(19) United States
(12) Patent Application Publication
(10) Pub. No.: US 2025/0082633 A1
(43) Pub. Date: Mar. 13, 2025

(54) COMPOUNDS AND METHODS FOR MODULATING SPLICING

(71) Applicant: REMIX THERAPEUTICS INC., Watertown, MA (US)

(72) Inventors: Dominic Reynolds, Stoneham, MA (US); Michael W. Seiler, Belmont, MA (US); Anant A. Agrawal, Waltham, MA (US); Frederic Vaillancourt, Newton, MA (US); Peter Smith, Arlington, MA (US); Sudeep Prajapati, Somerville, MA (US); Allen t. Hopper, Lexington, MA (US); Stepan Vyskocil, Benesov (CZ); Benoit Moreau, Newton, MA (US)

(21) Appl. No.: 18/713,561

(22) PCT Filed: Nov. 23, 2022
(86) PCT No.: PCT/US2022/050914

§ 371 Date: May 24, 2024

Related U.S. Application Data
(60) Provisional application No. 63/283,127, filed on Nov. 24, 2021.

(51) Int. Cl. A61K 31/5025; A61K 31/437; A61K 31/438; A61K 31/454; A61K 31/4545; A61K 31/4725; A61K 31/496; A61K 31/4985; A61P 25/28; A61P 35/00; C07D 401/14; C07D 403/04; C07D 403/14; C07D 413/04; C07D 413/14; C07D 417/14; C07D 471/04; C07D 487/04; C07D 519/00

(52) U.S. Cl. CPC A61K 31/5025; A61K 31/437; A61K 31/438; A61K 31/454; A61K 31/4545; A61K 31/4725; A61K 31/496; A61K 31/4985; A61P 25/28; A61P 35/00; C07D 401/14; C07D 403/04; C07D 403/14; C07D 413/04; C07D 413/14; C07D 417/14; C07D 471/04; C07D 487/04; C07D 519/00

(57) ABSTRACT

The present disclosure features compounds and related compositions that, inter alia, modulate nucleic acid splicing, e.g., splicing of a pre-mRNA, as well as methods of use thereof.

### CLAIM OF PRIORITY

[0001] This application claims priority to U.S. Application No. 63/283,127, filed on Nov. 24, 2021, the contents of which is incorporated herein by reference in its entirety.

### BACKGROUND

[0002] Alternative splicing is a major source of protein diversity in higher eukaryotes and is frequently regulated in a tissue-specific or development stage-specific manner. Disease associated alternative splicing patterns in pre-mRNAs are often mapped to changes in splice site signals or sequence motifs and regulatory splicing factors (Faustino and Cooper (2003), Genes Dev 17(4):419-37). Current therapies to modulate RNA expression involve oligonucleotide targeting and gene therapy; however, each of these modalities exhibit unique challenges as currently presented. As such, there is a need for new technologies to modulate RNA expression, including the development of small molecule compounds that target splicing.

### SUMMARY

[0003] The present disclosure features compounds and related compositions that, inter alia, modulate nucleic acid splicing, e.g., splicing of a pre-mRNA, as well as methods of use thereof. In an embodiment, the compounds described herein are compounds of Formula (I) (e.g., a compound of Formulas (I-a), (I-b), (I-c), (I-d), (I-e), (I-f), (I-g), (I-h), (I-i), (I-j), (I-k), (I-l), (I-m), (I-n), (I-o), (I-p), (I-q), (I-r), (I-s), (I-t), (I-u), or (I-v)) and pharmaceutically acceptable salts, solvates, hydrates, tautomers, or stereoisomers thereof. The present disclosure additionally provides methods of using the compounds of the invention (e.g., compounds of Formulas (I-a), (I-b), (I-c), (I-d), (I-e), (I-f), (I-g), (I-h), (I-i), (I-j), (I-k), (I-l), (I-m), (I-n), (I-o), (I-p), (I-q), (I-r), (I-s), (I-t), (I-u), or (I-v)) and pharmaceutically acceptable salts, solvates, hydrates, tautomers, stereoisomers thereof), and compositions thereof, e.g., to target, and in embodiments bind or form a complex with, a nucleic acid (e.g., a pre-mRNA or nucleic acid component of a small nuclear ribonucleoprotein (snRNP) or spliceosome), a protein (e.g., a protein component of an snRNP or spliceosome, e.g., a member of the splicing machinery, e.g., one or more of the U1, U2, U4, U5, U6, U11, U12, U4atac, U6atac snRNPs), or a combination thereof. In another aspect, the compounds described herein may be used to alter the composition or structure of a nucleic acid (e.g., a pre-mRNA or mRNA (e.g., a pre-mRNA and the mRNA which arises from the pre-mRNA), e.g., by increasing or decreasing splicing at a splice site. In some embodiments, increasing or decreasing splicing results in modulating the level of a gene product (e.g., an RNA or protein) produced.

[0004] In another aspect, the compounds described herein may be used for the prevention and/or treatment of a disease, disorder, or condition, e.g., a disease, disorder or condition associated with splicing, e.g., alternative splicing. In some embodiments, the compounds described herein (e.g., compounds of Formulas (I), (I-a), (I-b), (I-c), (I-d), (I-e), (I-f), (I-g), (I-h), (I-i), (I-j), (I-k), (I-l), (I-m), (I-n), (I-o), (I-p), (I-q), (I-r), (I-s), (I-t), (I-u), or (I-v)) and pharmaceutically acceptable salts, solvates, hydrates, tautomers, stereoisomers thereof) and compositions thereof are used for the prevention and/or treatment of a proliferative disease, disorder, or condition (e.g., a disease, disorder, or condition characterized by unwanted cell proliferation, e.g., a cancer or a benign neoplasm) in a subject. In some embodiments, the compounds described herein (e.g., compounds of Formulas (I), (I-a), (I-b), (I-c), (I-d), (I-e), (I-f), (I-g), (I-h), (I-i), (I-j), (I-k), (I-l), (I-m), (I-n), (I-o), (I-p), (I-q), (I-r), (I-s), (I-t), (I-u), or (I-v)) and pharmaceutically acceptable salts, solvates, hydrates, tautomers, stereoisomers thereof) and compositions thereof are used for the prevention and/or treatment of a non-proliferative disease, disorder, or condition. In some embodiments, the compounds described herein (e.g., compounds of Formulas (I), ((I-a), (I-b), (I-c), (I-d), (I-e), (I-f), (I-g), (I-h), (I-i), (I-j), (I-k), (I-l), (I-m), (I-n), (I-o), (I-p), (I-q), (I-r), (I-s), (I-t), (I-u), or (I-v), and pharmaceutically acceptable salts, solvates, hydrates, tautomers, stereoisomers thereof) and compositions thereof are used for the prevention and/or treatment of a neurological disease or disorder, an autoimmune disease or disorder, immunodeficiency disease or disorder, a lysosomal storage disease or disorder, a cardiovascular disease or disorder, a metabolic disease or disorder, a respiratory disease or disorder, a renal disease or disorder, or an infectious disease in a subject.

[0005] In one aspect, the present disclosure provides compounds of Formula (I):

[chemical structure]

or a pharmaceutically acceptable salt, solvate, hydrate, tautomer, or stereoisomer thereof, wherein A and B are each independently cycloalkyl, heterocyclyl, aryl, or heteroaryl, each of which is optionally substituted with one or more R¹; L is absent, C₁-C₆-alkylene, C₁-C₆-heteroalkylene, C(O), or —C(O)N(R^{B})—, wherein each alkylene and heteroalkylene is optionally substituted with one or more R⁸; W, X, Z¹, and Z² are each independently C(R³) or N, wherein at least one of W and X is N; each R¹ is independently hydrogen, C₁-C₆-alkyl, C₂-C₆-alkenyl, C₂-C₆-alkynyl, C₁-C₆-heteroalkyl, C₁-C₆-haloalkyl, cycloalkyl, heterocyclyl, aryl, C₁-C₆ alkylene-aryl, C₂-C₆ alkenylene-aryl, C₁-C₆ heteroalkylene-aryl, heteroaryl, C₁-C₆ alkylene-heteroaryl, C₁-C₆ heteroalkylene-heteroaryl, halo, cyano, oxo, —OR^{A}, —NR^{B}R^{C}, —NR^{B}C(O)R^{D}, —NO₂, —C(O)NR^{B}R^{C}, —C(O)R^{D}, —C(O)OR^{D}, or —S(O)ₓR^{D}, wherein each alkyl, alkylene, alkenyl, alkynyl, heteroalkyl, haloalkyl, cycloalkyl, heterocyclyl, aryl, and heteroaryl is optionally substituted with one or more R⁴; or two R¹ groups, together with the atoms to which they are attached, form a 3-7-membered cycloalkyl, heterocyclyl, aryl, or heteroaryl, wherein each cycloalkyl, heterocyclyl, aryl, and heteroaryl is optionally substituted with one or more R⁴; R² is hydrogen, C₁-C₆-alkyl, C₂-C₆-alkenyl, C₂-C₆-alkynyl, C₁-C₆-heteroalkyl, C₁-C₆-haloalkyl, cycloalkyl, heterocyclyl, aryl, heteroaryl, halo, cyano, —C(O)R^{D}, or —OR^{A}; wherein each alkyl, alkenyl, alkynyl, heteroalkyl, haloalkyl, cycloalkyl, heterocyclyl, aryl, and heteroaryl is optionally substituted with one or more R⁵; R³ is hydrogen, C₁-C₆-alkyl, C₂-C₆-alkenyl, C₂-C₆-alkynyl, C₁-C₆-heteroalkyl, C₁-C₆-haloalkyl, cycloalkyl, heterocyclyl, aryl, heteroaryl, halo, cyano, —C(O)R^{D}, or —OR^{A}; wherein each alkyl, alkenyl, alkynyl, heteroalkyl, haloalkyl, cycloalkyl, heterocyclyl, aryl, and heteroaryl is optionally substituted with one or more R⁵; each R⁴ is independently C₁-C₆-alkyl, C₂-C₆-alkenyl, C₂-C₆-alkynyl, C₁-C₆-heteroalkyl, C₁-C₆-haloalkyl, cycloalkyl, heterocyclyl, aryl, heteroaryl, halo, cyano, oxo, —OR^{A}, —NR^{B}R^{C}, —NR^{B}C(O)R^{D}, —NO₂, —C(O)NR^{B}R^{C}, —C(O)R^{D}, —C(O)OR^{D}, or —S(O)ₓR^{D}, wherein each alkyl, alkenyl, alkynyl, heteroalkyl, haloalkyl, cycloalkyl, heterocyclyl, aryl, and heteroaryl is optionally substituted with one or more R⁶; each R⁵ is C₁-C₆-alkyl, C₂-C₆-alkenyl, C₂-C₆-alkynyl, C₁-C₆-heteroalkyl, C₁-C₆-haloalkyl, cycloalkyl, heterocyclyl, aryl, heteroaryl, halo, cyano, oxo, —OR^{A}, —NR^{B}R^{C}, —NR^{B}C(O)R^{D}, —NO₂, —C(O)NR^{B}R^{C}, —C(O)R^{D}, —C(O)OR^{D}, or —S(O)ₓR^{D}; each R⁶ is independently C₁-C₆-alkyl, C₁-C₆-heteroalkyl, C₁-C₆-haloalkyl, cycloalkyl, heterocyclyl, aryl, heteroaryl, halo, cyano, oxo, or —OR^{A}; each R^{A} is independently hydrogen, C₁-C₆ alkyl, C₂-C₆ alkenyl, C₂-C₆ alkynyl, C₁-C₆ haloalkyl, C₁-C₆ heteroalkyl, cycloalkyl, heterocyclyl, aryl, heteroaryl, C₁-C₆ alkylene-aryl, C₁-C₆ alkylene-heteroaryl, —C(O)R^{D}, or —S(O)ₓR^{D}; each of R^{B} and R^{C} is independently hydrogen, C₁-C₆ alkyl, C₂-C₆ alkenyl, C₂-C₆ alkynyl, C₁-C₆ heteroalkyl, C₁-C₆ haloalkyl, cycloalkyl, heterocyclyl, aryl, heteroaryl, —C(O)R^{D}, or —S(O)ₓR^{D}; or R^{B} and R^{C} together with the atom to which they are attached form a 3-7-membered heterocyclyl ring optionally substituted with one or more R⁷; each R^{D} is independently hydrogen, C₁-C₆ alkyl, C₂-C₆ alkenyl, C₂-C₆ alkynyl, C₁-C₆ heteroalkyl, C₁-C₆ haloalkyl, cycloalkyl, heterocyclyl, aryl, heteroaryl, C₁-C₆ alkylene-aryl, or C₁-C₆ alkylene-heteroaryl; each R⁷ and R⁸ is independently C₁-C₆-alkyl, halo, cyano, oxo, or —OR^{A1}; each R^{A1} is hydrogen or C₁-C₆-alkyl; and x is 0, 1, or 2.

[0006] In another aspect, the present invention provides pharmaceutical compositions comprising a compound of Formula (I) (e.g., a compound of Formulas (I-a), (I-b), (I-c), (I-d), (I-e), (I-f), (I-g), (I-h), (I-i), (I-j), (I-k), (I-l), (I-m), (I-n), (I-o), (I-p), (I-q), (I-r), (I-s), (I-t), (I-u), or (I-v)), or a pharmaceutically acceptable salt, solvate, hydrate, tautomer, or stereoisomer thereof, and optionally a pharmaceutically acceptable excipient. In an embodiment, the pharmaceutical compositions described herein include an effective amount (e.g., a therapeutically effective amount) of a compound of Formula (I) (e.g., a compound of Formulas (I), (I-a), (I-b), (I-c), (I-d), (I-e), (I-f), (I-g), (I-h), (I-i), (I-j), (I-k), (I-l), (I-m), (I-n), (I-o), (I-p), (I-q), (I-r), (I-s), (I-t), (I-u), or (I-v)), or a pharmaceutically acceptable salt, solvate, hydrate, tautomer, or stereoisomer thereof.

[0007] In another aspect, the present disclosure provides methods for modulating splicing, e.g., splicing of a nucleic acid (e.g., a DNA or RNA, e.g., a pre-mRNA) with a compound of Formula (I) (e.g., a compound of Formulas (I), (I-a), (I-b), (I-c), (I-d), (I-e), (I-f), (I-g), (I-h), (I-i), (I-j), (I-k), (I-l), (I-m), (I-n), (I-o), (I-p), (I-q), (I-r), (I-s), (I-t), (I-u), or (I-v)) or a pharmaceutically acceptable salt, solvate, hydrate, tautomer, or stereoisomer thereof. In another aspect, the present disclosure provides compositions for use in modulating splicing, e.g., splicing of a nucleic acid (e.g., a DNA or RNA, e.g., a pre-mRNA) with a compound of Formula (I) (e.g., a compound of Formulas (I), (I-a), (I-b), (I-c), (I-d), (I-e), (I-f), (I-g), (I-h), (I-i), (I-j), (I-k), (I-l), (I-m), (I-n), (I-o), (I-p), (I-q), (I-r), (I-s), (I-t), (I-u), or (I-v)) or a pharmaceutically acceptable salt, solvate, hydrate, tautomer, or stereoisomer thereof. Modulation of splicing may comprise impacting any step involved in splicing and may include an event upstream or downstream of a splicing event. For example, in some embodiments, the compound of Formula (I) binds to a target, e.g., a target nucleic acid (e.g., DNA or RNA, e.g., a precursor RNA, e.g., a pre-mRNA), a target protein, or combination thereof (e.g., an snRNP and a pre-mRNA). A target may include a splice site in a pre-mRNA or a component of the splicing machinery, such as the U1 snRNP. In some embodiments, the compound of Formula (I) alters a target nucleic acid (e.g., DNA or RNA, e.g., a precursor RNA, e.g., a pre-mRNA), target protein, or combination thereof. In some embodiments, the compound of Formula (I) increases or decreases splicing at a splice site on a target nucleic acid (e.g., an RNA, e.g., a precursor RNA, e.g., a pre-mRNA) by about 0.5% or more (e.g., about 1%, 2%, 3%, 4%, 5%, 10%, 20%, 30%, 40%, 50%, 75%, 90%, 95%, or more), relative to a reference (e.g., the absence of a compound of Formula (I), e.g., in a healthy or diseased cell or tissue). In some embodiments, the presence of a compound of Formula (I) results an increase or decrease of transcription of a target nucleic acid (e.g., an RNA) by about 0.5% or more (e.g., about 1%, 2%, 3%, 4%, 5%, 10%, 20%, 30%, 40%, 50%, 75%, 90%, 95%, or more), relative to a reference (e.g., the absence of a compound of Formula (I), e.g., in a healthy or diseased cell or tissue).

[0008] In another aspect, the present disclosure provides methods for preventing and/or treating a disease, disorder, or condition in a subject by administering a compound of Formula (I) (e.g., a compound of Formulas (I), (I-a), (I-b), (I-c), (I-d), (I-e), (I-f), (I-g), (I-h), (I-i), (I-j), (I-k), (I-l), (I-m), (I-n), (I-o), (I-p), (I-q), (I-r), (I-s), (I-t), (I-u), or (I-v)) or a pharmaceutically acceptable salt, solvate, hydrate, tautomer, or stereoisomer thereof, or related compositions. In some embodiments, the disease or disorder entails unwanted or aberrant splicing. In some embodiments, the disease or disorder is a proliferative disease, disorder, or condition. Exemplary proliferative diseases include cancer, a benign neoplasm, or angiogenesis. In other embodiments, the present disclosure provides methods for treating and/or preventing a non-proliferative disease, disorder, or condition. In still other embodiments, the present disclosure provides methods for treating and/or preventing a neurological disease or disorder, autoimmune disease or disorder, immunodeficiency disease or disorder, lysosomal storage disease or disorder, cardiovascular disease or disorder, metabolic disease or disorder, respiratory disease or disorder, renal disease or disorder, or infectious disease.

[0009] In another aspect, the present disclosure provides methods of down-regulating the expression of (e.g., the level of or the rate of production of) a target protein with a compound of Formula (I) (e.g., a compound of Formulas (I), ((I-a), (I-b), (I-c), (I-d), (I-e), (I-f), (I-g), (I-h), (I-i), (I-j), (I-k), (I-l), (I-m), (I-n), (I-o), (I-p), (I-q), (I-r), (I-s), (I-t), (I-u), or (I-v)) or a pharmaceutically acceptable salt, solvate, hydrate, tautomer, or stereoisomer thereof in a biological sample or subject. In another aspect, the present disclosure provides methods of up-regulating the expression of (e.g., the level of or the rate of production of) a target protein with a compound of Formula (I) (e.g., a compound of Formulas (I), (I-a), (I-b), (I-c), (I-d), (I-e), (I-f), (I-g), (I-h), (I-i), (I-j), (I-k), (I-l), (I-m), (I-n), (I-o), (I-p), (I-q), (I-r), (I-s), (I-t), (I-u), or (I-v)) or a pharmaceutically acceptable salt, solvate, hydrate, tautomer, or stereoisomer thereof in a biological sample or subject. In another aspect, the present disclosure provides methods of altering the isoform of a target protein with a compound of Formula (I) (e.g., a compound of Formulas (I), (I-a), (I-b), (I-c), (I-d), (I-e), (I-f), (I-g), (I-h), (I-i), (I-j), (I-k), (I-l), (I-m), (I-n), (I-o), (I-p), (I-q), (I-r), (I-s), (I-t), (I-u), or (I-v)) or a pharmaceutically acceptable salt, solvate, hydrate, tautomer, or stereoisomer thereof in a biological sample or subject. Another aspect of the disclosure relates to methods of inhibiting the activity of a target protein in a biological sample or subject. In some embodiments, administration of a compound of Formula (I) to a biological sample, a cell, or a subject comprises inhibition of cell growth or induction of cell death.

[0010] In another aspect, the present disclosure provides compositions for use in preventing and/or treating a disease, disorder, or condition in a subject by administering a compound of Formula (I) (e.g., a compound of Formulas (I), (I-a), (I-b), (I-c), (I-d), (I-e), (I-f), (I-g), (I-h), (I-i), (I-j), (I-k), (I-l), (I-m), (I-n), (I-o), (I-p), (I-q), (I-r), (I-s), (I-t), (I-u), or (I-v)) or a pharmaceutically acceptable salt, solvate, hydrate, tautomer, or stereoisomer thereof, or related compositions. In some embodiments, the disease or disorder entails unwanted or aberrant splicing. In some embodiments, the disease or disorder is a proliferative disease, disorder, or condition. Exemplary proliferative diseases include cancer, a benign neoplasm, or angiogenesis. In other embodiments, the present disclosure provides methods for treating and/or preventing a non-proliferative disease, disorder, or condition. In still other embodiments, the present disclosure provides methods for treating and/or preventing a neurological disease or disorder, autoimmune disease or disorder, immunodeficiency disease or disorder, lysosomal storage disease or disorder, cardiovascular disease or disorder, metabolic disease or disorder, respiratory disease or disorder, renal disease or disorder, or infectious disease.

[0011] In another aspect, the present disclosure provides compositions for use in down-regulating the expression of (e.g., the level of or the rate of production of) a target protein with a compound of Formula (I) (e.g., a compound of Formulas (I), (I-a), (I-b), (I-c), (I-d), (I-e), (I-f), (I-g), (I-h), (I-i), (I-j), (I-k), (I-l), (I-m), (I-n), (I-o), (I-p), (I-q), (I-r), (I-s), (I-t), (I-u), or (I-v)) or a pharmaceutically acceptable salt, solvate, hydrate, tautomer, or stereoisomer thereof in a biological sample or subject. In another aspect, the present disclosure provides compositions for use in up-regulating the expression of (e.g., the level of or the rate of production of) a target protein with a compound of Formula (I) (e.g., a compound of Formulas (I), (I-a), (I-b), (I-c), (I-d), (I-e), (I-f), (I-g), (I-h), (I-i), (I-j), (I-k), (I-l), (I-m), (I-n), (I-o), (I-p), (I-q), (I-r), (I-s), (I-t), (I-u), or (I-v)) or a pharmaceutically acceptable salt, solvate, hydrate, tautomer, or stereoisomer thereof in a biological sample or subject. In another aspect, the present disclosure provides compositions for use in altering the isoform of a target protein with a compound of Formula (I) (e.g., a compound of Formulas (I), (I-a), (I-b), (I-c), (I-d), (I-e), (I-f), (I-g), (I-h), (I-i), (I-j), (I-k), (I-l), (I-m), (I-n), (I-o), (I-p), (I-q), (I-r), (I-s), (I-t), (I-u), or (I-v)) or a pharmaceutically acceptable salt, solvate, hydrate, tautomer, or stereoisomer thereof in a biological sample or subject. Another aspect of the disclosure relates to compositions for use in inhibiting the activity of a target protein in a biological sample or subject. In some embodiments, administration of a compound of Formula (I) to a biological sample, a cell, or a subject comprises inhibition of cell growth or induction of cell death.

[0012] In another aspect, the present disclosure features kits comprising a container with a compound of Formula (I) (e.g., a compound of Formulas (I), ((I-a), (I-b), (I-c), (I-d), (I-e), (I-f), (I-g), (I-h), (I-i), (I-j), (I-k), (I-l), (I-m), (I-n), (I-o), (I-p), (I-q), (I-r), (I-s), (I-t), (I-u), or (I-v)) or a pharmaceutically acceptable salt, solvate, hydrate, tautomer, stereoisomer thereof, or a pharmaceutical composition thereof. In certain embodiments, the kits described herein further include instructions for administering the compound of Formula (I) or the pharmaceutically acceptable salt, solvate, hydrate, tautomer, stereoisomer thereof, or the pharmaceutical composition thereof.

[0013] The details of one or more embodiments of the invention are set forth herein. Other features, objects, and advantages of the invention will be apparent from the Detailed Description, the Examples, and the Claims.

### DETAILED DESCRIPTION

### Selected Chemical Definitions

[0014] Definitions of specific functional groups and chemical terms are described in more detail below. The chemical elements are identified in accordance with the Periodic Table of the Elements, CAS version, Handbook of Chemistry and Physics, 75^{th} Ed., inside cover, and specific functional groups are generally defined as described therein. Additionally, general principles of organic chemistry, as well as specific functional moieties and reactivity, are described in Thomas Sorrell, Organic Chemistry, University Science Books, Sausalito, 1999; Smith and March, March's Advanced Organic Chemistry, 5^{th} Edition, John Wiley & Sons, Inc., New York, 2001; Larock, Comprehensive Organic Transformations, VCH Publishers, Inc., New York, 1989; and Carruthers, Some Modern Methods of Organic Synthesis, 3^{rd} Edition, Cambridge University Press, Cambridge, 1987.

[0015] The abbreviations used herein have their conventional meaning within the chemical and biological arts. The chemical structures and formulae set forth herein are constructed according to the standard rules of chemical valency known in the chemical arts.

[0016] When a range of values is listed, it is intended to encompass each value and sub-range within the range. For example “C₁-C₆ alkyl” is intended to encompass, C₁, C₂, C₃, C₄, C₅, C₆, C₁-C₆, C₁-C₅, C₁-C₄, C₁-C₃, C₁-C₂, C₂-C₆, C₂-C₅, C₂-C₄, C₂-C₃, C₃-C₆, C₃-C₅, C₃-C₄, C₄-C₆, C₄-C₅, and C₅-C₆ alkyl.

[0017] The following terms are intended to have the meanings presented therewith below and are useful in understanding the description and intended scope of the present invention.

[0018] As used herein, “alkyl” refers to a radical of a straight-chain or branched saturated hydrocarbon group having from 1 to 24 carbon atoms (“C₁-C₂₄ alkyl”). In some embodiments, an alkyl group has 1 to 12 carbon atoms (“C₁-C₁₂ alkyl”). In some embodiments, an alkyl group has 1 to 8 carbon atoms (“C₁-C₈ alkyl”). In some embodiments, an alkyl group has 1 to 6 carbon atoms (“C₁-C₆ alkyl”). In some embodiments, an alkyl group has 2 to 6 carbon atoms (“C₂-C₆ alkyl”). In some embodiments, an alkyl group has 1 carbon atom (“C₁ alkyl”). Examples of C₁-C₆alkyl groups include methyl (C₁), ethyl (C₂), n-propyl (C₃), isopropyl (C₃), n-butyl (C₄), tert-butyl (C₄), sec-butyl (C₄), iso-butyl (C₄), n-pentyl (C₅), 3-pentanyl (C₅), amyl (C₅), neopentyl (C₅), 3-methyl-2-butanyl (C₅), tertiary amyl (C₅), and n-hexyl (C₆). Additional examples of alkyl groups include n-heptyl (C₇), n-octyl (C₈) and the like. Each instance of an alkyl group may be independently optionally substituted, i.e., unsubstituted (an “unsubstituted alkyl”) or substituted (a “substituted alkyl”) with one or more substituents; e.g., for instance from 1 to 5 substituents, 1 to 3 substituents, or 1 substituent. In certain embodiments, the alkyl group is unsubstituted C₁-C₁₀ alkyl (e.g., —CH₃). In certain embodiments, the alkyl group is substituted C₁-C₆ alkyl.

[0019] As used herein, “alkenyl” refers to a radical of a straight-chain or branched hydrocarbon group having from 2 to 24 carbon atoms, one or more carbon-carbon double bonds, and no triple bonds (“C₂-C₂₄ alkenyl”). In some embodiments, an alkenyl group has 2 to 10 carbon atoms (“C₂-C₁₀ alkenyl”). In some embodiments, an alkenyl group has 2 to 8 carbon atoms (“C₂-C₈ alkenyl”). In some embodiments, an alkenyl group has 2 to 6 carbon atoms (“C₂-C₆ alkenyl”). In some embodiments, an alkenyl group has 2 carbon atoms (“C₂ alkenyl”). The one or more carbon-carbon double bonds can be internal (such as in 2-butenyl) or terminal (such as in 1-butenyl). Examples of C₂-C₄ alkenyl groups include ethenyl (C₂), 1-propenyl (C₃), 2-propenyl (C₃), 1-butenyl (C₄), 2-butenyl (C₄), butadienyl (C₄), and the like. Examples of C₂-C₆ alkenyl groups include the aforementioned C₂₋₄ alkenyl groups as well as pentenyl (C₅), pentadienyl (C₅), hexenyl (C₆), and the like. Additional examples of alkenyl include heptenyl (C₇), octenyl (C₈), octatrienyl (C₈), and the like. Each instance of an alkenyl group may be independently optionally substituted, i.e., unsubstituted (an “unsubstituted alkenyl”) or substituted (a “substituted alkenyl”) with one or more substituents e.g., for instance from 1 to 5 substituents, 1 to 3 substituents, or 1 substituent. In certain embodiments, the alkenyl group is unsubstituted C₁-C₁₀ alkenyl. In certain embodiments, the alkenyl group is substituted C₂-C₆ alkenyl.

[0020] As used herein, the term “alkynyl” refers to a radical of a straight-chain or branched hydrocarbon group having from 2 to 24 carbon atoms, one or more carbon-carbon triple bonds (“C₂-C₂₄ alkenyl”). In some embodiments, an alkynyl group has 2 to 10 carbon atoms (“C₂-C₁₀ alkynyl”). In some embodiments, an alkynyl group has 2 to 8 carbon atoms (“C₂-C₈ alkynyl”). In some embodiments, an alkynyl group has 2 to 6 carbon atoms (“C₂-C₆ alkynyl”). In some embodiments, an alkynyl group has 2 carbon atoms (“C₂ alkynyl”). The one or more carbon-carbon triple bonds can be internal (such as in 2-butynyl) or terminal (such as in 1-butynyl). Examples of C₂-C₄ alkynyl groups include ethynyl (C₂), 1-propynyl (C₃), 2-propynyl (C₃), 1-butynyl (C₄), 2-butynyl (C₄), and the like. Each instance of an alkynyl group may be independently optionally substituted, i.e., unsubstituted (an “unsubstituted alkynyl”) or substituted (a “substituted alkynyl”) with one or more substituents e.g., for instance from 1 to 5 substituents, 1 to 3 substituents, or 1 substituent. In certain embodiments, the alkynyl group is unsubstituted C₂₋₁₀ alkynyl. In certain embodiments, the alkynyl group is substituted C₂₋₆ alkynyl.

[0021] As used herein, the term “haloalkyl,” refers to a non-cyclic stable straight or branched chain, or combinations thereof, including at least one carbon atom and at least one halogen selected from the group consisting of F, Cl, Br, and I. The halogen(s) F, Cl, Br, and I may be placed at any position of the haloalkyl group. Exemplary haloalkyl groups include, but are not limited to: —CF₃, —CCl₃, —CH₂—CF₃, —CH₂—CCl₃, —CH₂—CBr₃, —CH₂—CI₃, —CH₂—CH₂—CH(CF₃)—CH₃, —CH₂—CH₂—CH(Br)—CH₃, and —CH₂—CH═CH—CH₂—CF₃. Each instance of a haloalkyl group may be independently optionally substituted, i.e., unsubstituted (an “unsubstituted haloalkyl”) or substituted (a “substituted haloalkyl”) with one or more substituents e.g., for instance from 1 to 5 substituents, 1 to 3 substituents, or 1 substituent

[0022] As used herein, the term “heteroalkyl,” refers to a non-cyclic stable straight or branched chain, or combinations thereof, including at least one carbon atom and at least one heteroatom selected from the group consisting of O, N, P, Si, and S, and wherein the nitrogen and sulfur atoms may optionally be oxidized, and the nitrogen heteroatom may optionally be quaternized.

[0023] The heteroatom(s) O, N, P, S, and Si may be placed at any position of the heteroalkyl group. Exemplary heteroalkyl groups include, but are not limited to: —CH₂—CH₂—O—CH₃, —CH₂—CH₂—NH—CH₃, —CH₂—CH₂—N(CH₃)—CH₃, —CH₂—S—CH₂—CH₃, —CH₂—CH₂, —S(O)—CH₃, —CH₂—CH₂—S(O)₂—CH₃, —CH═CHO—CH₃, —Si(CH₃)₃, —CH₂—CH═N—OCH₃, —CH═CH—N(CH₃)—CH₃, —O—CH₃, and —O—CH₂—CH₃. Up to two or three heteroatoms may be consecutive, such as, for example, —CH₂—NH—OCH₃ and —CH₂—O—Si(CH₃)₃. Where “heteroalkyl” is recited, followed by recitations of specific heteroalkyl groups, such as —CH₂O, —NR^{C}R^{D}, or the like, it will be understood that the terms heteroalkyl and —CH₂O or —NR^{C}R^{D} are not redundant or mutually exclusive. Rather, the specific heteroalkyl groups are recited to add clarity. Thus, the term “heteroalkyl” should not be interpreted herein as excluding specific heteroalkyl groups, such as —CH₂O, —NR^{C}R^{D}, or the like. Each instance of a heteroalkyl group may be independently optionally substituted, i.e., unsubstituted (an “unsubstituted heteroalkyl”) or substituted (a “substituted heteroalkyl”) with one or more substituents e.g., for instance from 1 to 5 substituents, 1 to 3 substituents, or 1 substituent

[0024] As used herein, “aryl” refers to a radical of a monocyclic or polycyclic (e.g., bicyclic or tricyclic) 4n+2 aromatic ring system (e.g., having 6, 10, or 14 π electrons shared in a cyclic array) having 6-14 ring carbon atoms and zero heteroatoms provided in the aromatic ring system (“C₆-C₁₄ aryl”). In some embodiments, an aryl group has six ring carbon atoms (“C₆ aryl”; e.g., phenyl). In some embodiments, an aryl group has ten ring carbon atoms (“C₁₀ aryl”; e.g., naphthyl such as 1-naphthyl and 2-naphthyl). In some embodiments, an aryl group has fourteen ring carbon atoms (“C₁₄ aryl”; e.g., anthracyl). An aryl group may be described as, e.g., a C₆-C₁₀-membered aryl, wherein the term “membered” refers to the non-hydrogen ring atoms within the moiety. Aryl groups include phenyl, naphthyl, indenyl, and tetrahydronaphthyl. Each instance of an aryl group may be independently optionally substituted, i.e., unsubstituted (an “unsubstituted aryl”) or substituted (a “substituted aryl”) with one or more substituents. In certain embodiments, the aryl group is unsubstituted C₆-C₁₄ aryl. In certain embodiments, the aryl group is substituted C₆-C₁₄ aryl.

[0025] As used herein, “heteroaryl” refers to a radical of a 5-10 membered monocyclic or bicyclic 4n+2 aromatic ring system (e.g., having 6 or 10 π electrons shared in a cyclic array) having ring carbon atoms and 1-4 ring heteroatoms provided in the aromatic ring system, wherein each heteroatom is independently selected from nitrogen, oxygen and sulfur (“5-10 membered heteroaryl”). In heteroaryl groups that contain one or more nitrogen atoms, the point of attachment can be a carbon or nitrogen atom, as valency permits. Heteroaryl bicyclic ring systems can include one or more heteroatoms in one or both rings. “Heteroaryl” also includes ring systems wherein the heteroaryl ring, as defined above, is fused with one or more aryl groups wherein the point of attachment is either on the aryl or heteroaryl ring, and in such instances, the number of ring members designates the number of ring members in the fused (aryl/heteroaryl) ring system. Bicyclic heteroaryl groups wherein one ring does not contain a heteroatom (e.g., indolyl, quinolinyl, carbazolyl, and the like) the point of attachment can be on either ring, i.e., either the ring bearing a heteroatom (e.g., 2-indolyl) or the ring that does not contain a heteroatom (e.g., 5-indolyl). A heteroaryl group may be described as, e.g., a 6-10-membered heteroaryl, wherein the term “membered” refers to the non-hydrogen ring atoms within the moiety. Each instance of a heteroaryl group may be independently optionally substituted, i.e., unsubstituted (an “unsubstituted heteroaryl”) or substituted (a “substituted heteroaryl”) with one or more substituents e.g., for instance from 1 to 5 substituents, 1 to 3 substituents, or 1 substituent

[0026] Exemplary 5-membered heteroaryl groups containing one heteroatom include, without limitation, pyrrolyl, furanyl and thiophenyl. Exemplary 5-membered heteroaryl groups containing two heteroatoms include, without limitation, imidazolyl, pyrazolyl, oxazolyl, isoxazolyl, thiazolyl, and isothiazolyl. Exemplary 5-membered heteroaryl groups containing three heteroatoms include, without limitation, triazolyl, oxadiazolyl, and thiadiazolyl. Exemplary 5-membered heteroaryl groups containing four heteroatoms include, without limitation, tetrazolyl. Exemplary 6-membered heteroaryl groups containing one heteroatom include, without limitation, pyridinyl. Exemplary 6-membered heteroaryl groups containing two heteroatoms include, without limitation, pyridazinyl, pyrimidinyl, and pyrazinyl. Exemplary 6-membered heteroaryl groups containing three or four heteroatoms include, without limitation, triazinyl and tetrazinyl, respectively. Exemplary 7-membered heteroaryl groups containing one heteroatom include, without limitation, azepinyl, oxepinyl, and thiepinyl. Exemplary 5,6-bicyclic heteroaryl groups include, without limitation, indolyl, isoindolyl, indazolyl, benzotriazolyl, benzothiophenyl, isobenzothiophenyl, benzofuranyl, benzoisofuranyl, benzimidazolyl, benzoxazolyl, benzisoxazolyl, benzoxadiazolyl, benzthiazolyl, benzisothiazolyl, benzthiadiazolyl, indolizinyl, and purinyl. Exemplary 6,6-bicyclic heteroaryl groups include, without limitation, naphthyridinyl, pteridinyl, quinolinyl, isoquinolinyl, cinnolinyl, quinoxalinyl, phthalazinyl, and quinazolinyl. Other exemplary heteroaryl groups include heme and heme derivatives.

[0027] As used herein, “cycloalkyl” refers to a radical of a non-aromatic cyclic hydrocarbon group having from 3 to 10 ring carbon atoms (“C₃-C₁₀ cycloalkyl”) and zero heteroatoms in the non-aromatic ring system. In some embodiments, a cycloalkyl group has 3 to 8 ring carbon atoms (“C₃-C₈ cycloalkyl”). In some embodiments, a cycloalkyl group has 3 to 6 ring carbon atoms (“C₃-C₆ cycloalkyl”). In some embodiments, a cycloalkyl group has 3 to 6 ring carbon atoms (“C₃-C₆ cycloalkyl”). In some embodiments, a cycloalkyl group has 5 to 10 ring carbon atoms (“C₅-C₁₀ cycloalkyl”). A cycloalkyl group may be described as, e.g., a C₄-C₇-membered cycloalkyl, wherein the term “membered” refers to the non-hydrogen ring atoms within the moiety. Exemplary C₃-C₆ cycloalkyl groups include, without limitation, cyclopropyl (C₃), cyclopropenyl (C₃), cyclobutyl (C₄), cyclobutenyl (C₄), cyclopentyl (C₅), cyclopentenyl (C₅), cyclohexyl (C₆), cyclohexenyl (C₆), cyclohexadienyl (C₆), and the like. Exemplary C₃-C₈ cycloalkyl groups include, without limitation, the aforementioned C₃-C₆ cycloalkyl groups as well as cycloheptyl (C₇), cycloheptenyl (C₇), cycloheptadienyl (C₇), cycloheptatrienyl (C₇), cyclooctyl (C₈), cyclooctenyl (C₈), cubanyl (C₈), bicyclo[1.1.1]pentanyl (C₅), bicyclo[2.2.2]octanyl (C₈), bicyclo[2.1.1]hexanyl (C₆), bicyclo[3.1.1]heptanyl (C₇), and the like. Exemplary C₃-C₁₀ cycloalkyl groups include, without limitation, the aforementioned C₃-C₈ cycloalkyl groups as well as cyclononyl (C₉), cyclononenyl (C₉), cyclodecyl (C₁₀), cyclodecenyl (C₁₀), octahydro-1H-indenyl (C₉), decahydronaphthalenyl (C₁₀), spiro[4.5]decanyl (C₁₀), and the like. As the foregoing examples illustrate, in certain embodiments, the cycloalkyl group is either monocyclic (“monocyclic cycloalkyl”) or contain a fused, bridged or spiro ring system such as a bicyclic system (“bicyclic cycloalkyl”) and can be saturated or can be partially unsaturated. “Cycloalkyl” also includes ring systems wherein the cycloalkyl ring, as defined above, is fused with one or more aryl groups wherein the point of attachment is on the cycloalkyl ring, and in such instances, the number of carbons continue to designate the number of carbons in the cycloalkyl ring system. Each instance of a cycloalkyl group may be independently optionally substituted, i.e., unsubstituted (an “unsubstituted cycloalkyl”) or substituted (a “substituted cycloalkyl”) with one or more substituents. In certain embodiments, the cycloalkyl group is unsubstituted C₃-C₁₀ cycloalkyl. In certain embodiments, the cycloalkyl group is a substituted C₃-C₁₀ cycloalkyl.

[0028] “Heterocyclyl” as used herein refers to a radical of a 3- to 16-membered non-aromatic ring system having ring carbon atoms and 1 to 8 ring heteroatoms, wherein each heteroatom is independently selected from nitrogen, oxygen, sulfur, boron, phosphorus, and silicon (“3-16 membered heterocyclyl”). In heterocyclyl groups that contain one or more nitrogen atoms, the point of attachment can be a carbon or nitrogen atom, as valency permits. A heterocyclyl group can either be monocyclic (“monocyclic heterocyclyl”) or a fused, bridged or spiro ring system such as a bicyclic system (“bicyclic heterocyclyl”), and can be saturated or can be partially unsaturated. Heterocyclyl bicyclic ring systems can include one or more heteroatoms in one or both rings. “Heterocyclyl” also includes ring systems wherein the heterocyclyl ring, as defined above, is fused with one or more cycloalkyl groups wherein the point of attachment is either on the cycloalkyl or heterocyclyl ring, or ring systems wherein the heterocyclyl ring, as defined above, is fused with one or more aryl or heteroaryl groups, wherein the point of attachment is on the heterocyclyl ring, and in such instances, the number of ring members continue to designate the number of ring members in the heterocyclyl ring system. A heterocyclyl group may be described as, e.g., a 3-7-membered heterocyclyl, wherein the term “membered” refers to the non-hydrogen ring atoms, i.e., carbon, nitrogen, oxygen, sulfur, boron, phosphorus, and silicon, within the moiety. Each instance of heterocyclyl may be independently optionally substituted, i.e., unsubstituted (an “unsubstituted heterocyclyl”) or substituted (a “substituted heterocyclyl”) with one or more substituents. In certain embodiments, the heterocyclyl group is unsubstituted 3-16 membered heterocyclyl. In certain embodiments, the heterocyclyl group is substituted 3-16 membered heterocyclyl.

[0029] Exemplary 3-membered heterocyclyl groups containing one heteroatom include, without limitation, azirdinyl, oxiranyl, thiorenyl. Exemplary 4-membered heterocyclyl groups containing one heteroatom include, without limitation, azetidinyl, oxetanyl and thietanyl. Exemplary 5-membered heterocyclyl groups containing one heteroatom include, without limitation, tetrahydrofuranyl, dihydrofuranyl, tetrahydrothiophenyl, dihydrothiophenyl, pyrrolidinyl, dihydropyrrolyl and pyrrolyl-2,5-dione. Exemplary 5-membered heterocyclyl groups containing two heteroatoms include, without limitation, dioxolanyl, oxasulfuranyl, disulfuranyl, and oxazolidin-2-one. Exemplary 5-membered heterocyclyl groups containing three heteroatoms include, without limitation, triazolinyl, oxadiazolinyl, and thiadiazolinyl. Exemplary 6-membered heterocyclyl groups containing one heteroatom include, without limitation, piperidinyl (e.g., 2,2,6,6-tetramethylpiperidinyl), tetrahydropyranyl, dihydropyridinyl, pyridinonyl (e.g., 1-methylpyridin2-onyl), and thianyl. Exemplary 6-membered heterocyclyl groups containing two heteroatoms include, without limitation, piperazinyl, morpholinyl, pyridazinonyl (2-methylpyridazin-3-onyl), pyrimidinonyl (e.g., 1-methylpyrimidin-2-onyl, 3-methylpyrimidin-4-onyl), dithianyl, dioxanyl. Exemplary 6-membered heterocyclyl groups containing two heteroatoms include, without limitation, triazinanyl. Exemplary 7-membered heterocyclyl groups containing one heteroatom include, without limitation, azepanyl, oxepanyl and thiepanyl. Exemplary 8-membered heterocyclyl groups containing one heteroatom include, without limitation, azocanyl, oxecanyl and thiocanyl. Exemplary 5-membered heterocyclyl groups fused to a C₆ aryl ring (also referred to herein as a 5,6-bicyclic heterocyclyl ring) include, without limitation, indolinyl, isoindolinyl, dihydrobenzofuranyl, dihydrobenzothienyl, benzoxazolinonyl, and the like. Exemplary 5-membered heterocyclyl groups fused to a heterocyclyl ring (also referred to herein as a 5,5-bicyclic heterocyclyl ring) include, without limitation, octahydropyrrolopyrrolyl (e.g., octahydropyrrolo[3,4-c]pyrrolyl), and the like. Exemplary 6-membered heterocyclyl groups fused to a heterocyclyl ring (also referred to as a 4,6-membered heterocyclyl ring) include, without limitation, diazaspirononanyl (e.g., 2,7-diazaspiro[3.5]nonanyl). Exemplary 6-membered heterocyclyl groups fused to an aryl ring (also referred to herein as a 6,6-bicyclic heterocyclyl ring) include, without limitation, tetrahydroquinolinyl, tetrahydroisoquinolinyl, and the like. Exemplary 6-membered heterocyclyl groups fused to a cycloalkyl ring (also referred to herein as a 6,7-bicyclic heterocyclyl ring) include, without limitation, azabicyclooctanyl (e.g., (1,5)-8-azabicyclo[3.2.1]octanyl). Exemplary 6-membered heterocyclyl groups fused to a cycloalkyl ring (also referred to herein as a 6,8-bicyclic heterocyclyl ring) include, without limitation, azabicyclononanyl (e.g., 9-azabicyclo[3.3.1]nonanyl).

[0030] The terms “alkylene,” “alkenylene,” “alkynylene,” “haloalkylene,” “heteroalkylene,” “cycloalkylene,” or “heterocyclylene,” alone or as part of another substituent, mean, unless otherwise stated, a divalent radical derived from an alkyl, alkenyl, alkynyl, haloalkylene, heteroalkylene, cycloalkyl, or heterocyclyl respectively. For example, the term “alkenylene,” by itself or as part of another substituent, means, unless otherwise stated, a divalent radical derived from an alkene. An alkylene, alkenylene, alkynylene, haloalkylene, heteroalkylene, cycloalkylene, or heterocyclylene group may be described as, e.g., a C₁-C₆-membered alkylene, C₂-C₆-membered alkenylene, C₂-C₆-membered alkynylene, C₁-C₆-membered haloalkylene, C₁-C₆-membered heteroalkylene, C₃-C₈-membered cycloalkylene, or C₃-C₈-membered heterocyclylene, wherein the term “membered” refers to the non-hydrogen atoms within the moiety. In the case of heteroalkylene and heterocyclylene groups, heteroatoms can also occupy either or both of the chain termini (e.g., alkyleneoxy, alkylenedioxy, alkyleneamino, alkylenediamino, and the like). Still further, no orientation of the linking group is implied by the direction in which the formula of the linking group is written. For example, the formula —C(O)₂R′— may represent both —C(O)₂R′— and —R′C(O)₂—.

[0031] As used herein, the terms “cyano” or “—CN” refer to a substituent having a carbon atom joined to a nitrogen atom by a triple bond, e.g., C≡N.

[0032] As used herein, the terms “halogen” or “halo” refer to fluorine, chlorine, bromine or iodine.

[0033] As used herein, the term “hydroxy” refers to —OH.

[0034] As used herein, the term “nitro” refers to a substitutent having two oxygen atoms bound to a nitrogen atom, e.g., —NO₂.

[0035] As used herein, the term “nucleobase” as used herein, is a nitrogen-containing biological compounds found linked to a sugar within a nucleoside—the basic building blocks of deoxyribonucleic acid (DNA) and ribonucleic acid (RNA). The primary, or naturally occurring, nucleobases are cytosine (DNA and RNA), guanine (DNA and RNA), adenine (DNA and RNA), thymine (DNA) and uracil (RNA), abbreviated as C, G, A, T, and U, respectively. Because A, G, C, and T appear in the DNA, these molecules are called DNA-bases; A, G, C, and U are called RNA-bases. Adenine and guanine belong to the double-ringed class of molecules called purines (abbreviated as R). Cytosine, thymine, and uracil are all pyrimidines. Other nucleobases that do not function as normal parts of the genetic code, are termed non-naturally occurring. In an embodiment, a nucleobase may be chemically modified, for example, with an alkyl (e.g., methyl), halo, —O-alkyl, or other modification.

[0036] As used herein, the term “nucleic acid” refers to deoxyribonucleic acids (DNA) or ribonucleic acids (RNA) and polymers thereof in either single- or double-stranded form. The term “nucleic acid” includes a gene, cDNA, pre-mRNA, or an mRNA. In one embodiment, the nucleic acid molecule is synthetic (e.g., chemically synthesized) or recombinant. Unless specifically limited, the term encompasses nucleic acids containing analogues or derivatives of natural nucleotides that have similar binding properties as the reference nucleic acid and are metabolized in a manner similar to naturally occurring nucleotides. Unless otherwise indicated, a particular nucleic acid sequence also implicitly encompasses conservatively modified variants thereof (e.g., degenerate codon substitutions), alleles, orthologs, SNPs, and complementarity sequences as well as the sequence explicitly indicated.

[0037] As used herein, “oxo” refers to a carbonyl, i.e., —C(O)—.

[0038] The symbol “ [symbol] ” as used herein in relation to a compound of Formula (I) refers to an attachment point to another moiety or functional group within the compound.

[0039] Alkyl, alkenyl, alkynyl, haloalkyl, heteroalkyl, cycloalkyl, heterocyclyl, aryl, and heteroaryl groups, as defined herein, are optionally substituted. In general, the term “substituted”, whether preceded by the term “optionally” or not, means that at least one hydrogen present on a group (e.g., a carbon or nitrogen atom) is replaced with a permissible substituent, e.g., a substituent which upon substitution results in a stable compound, e.g., a compound which does not spontaneously undergo transformation such as by rearrangement, cyclization, elimination, or other reaction. Unless otherwise indicated, a “substituted” group has a substituent at one or more substitutable positions of the group, and when more than one position in any given structure is substituted, the substituent is either the same or different at each position. The term “substituted” is contemplated to include substitution with all permissible substituents of organic compounds, such as any of the substituents described herein that result in the formation of a stable compound. The present disclosure contemplates any and all such combinations in order to arrive at a stable compound. For purposes of this invention, heteroatoms such as nitrogen may have hydrogen substituents and/or any suitable substituent as described herein which satisfy the valencies of the heteroatoms and results in the formation of a stable moiety.

[0040] Two or more substituents may optionally be joined to form aryl, heteroaryl, cycloalkyl, or heterocyclyl groups. Such so-called ring-forming substituents are typically, though not necessarily, found attached to a cyclic base structure. In one embodiment, the ring-forming substituents are attached to adjacent members of the base structure. For example, two ring-forming substituents attached to adjacent members of a cyclic base structure create a fused ring structure. In another embodiment, the ring-forming substituents are attached to a single member of the base structure. For example, two ring-forming substituents attached to a single member of a cyclic base structure create a spirocyclic structure. In yet another embodiment, the ring-forming substituents are attached to non-adjacent members of the base structure.

[0041] The compounds provided herein may exist in one or more particular geometric, optical, enantiomeric, diasteriomeric, epimeric, stereoisomeric, tautomeric, conformational, or anomeric forms, including but not limited to: cis- and trans-forms; E- and Z-forms; endo- and exo-forms; R-, S-, and meso-forms; D- and L-forms; d- and l-forms; (+) and (−) forms; keto-, enol-, and enolate-forms; syn- and anti-forms; synclinal- and anticlinal-forms; α- and β-forms; axial and equatorial forms; boat-, chair-, twist-, envelope-, and half chair-forms; and combinations thereof, hereinafter collectively referred to as “isomers” (or “isomeric forms”).

[0042] Compounds described herein can comprise one or more asymmetric centers, and thus can exist in various isomeric forms, e.g., enantiomers and/or diastereomers. For example, the compounds described herein can be in the form of an individual enantiomer, diastereomer or geometric isomer, or can be in the form of a mixture of stereoisomers, including racemic mixtures and mixtures enriched in one or more stereoisomer. In an embodiment, the stereochemistry depicted in a compound is relative rather than absolute. Isomers can be isolated from mixtures by methods known to those skilled in the art, including chiral high-pressure liquid chromatography (HPLC) and the formation and crystallization of chiral salts; or preferred isomers can be prepared by asymmetric syntheses. See, for example, Jacques et al., Enantiomers, Racemates and Resolutions (Wiley Interscience, New York, 1981); Wilen et al., Tetrahedron 33:2725 (1977); Eliel, Stereochemistry of Carbon Compounds (McGraw-Hill, NY, 1962); and Wilen, Tables of Resolving Agents and Optical Resolutions p. 268 (E. L. Eliel, Ed., Univ. of Notre Dame Press, Notre Dame, IN 1972). This disclosure additionally encompasses compounds described herein as individual isomers substantially free of other isomers, and alternatively, as mixtures of various isomers.

[0043] As used herein, a pure enantiomeric compound is substantially free from other enantiomers or stereoisomers of the compound (i.e., in enantiomeric excess). In other words, an “S” form of the compound is substantially free from the “R” form of the compound and is, thus, in enantiomeric excess of the “R” form. The term “enantiomerically pure” or “pure enantiomer” denotes that the compound comprises more than 75% by weight, more than 80% by weight, more than 85% by weight, more than 90% by weight, more than 91% by weight, more than 92% by weight, more than 93% by weight, more than 94% by weight, more than 95% by weight, more than 96% by weight, more than 97% by weight, more than 98% by weight, more than 99% by weight, more than 99.5% by weight, or more than 99.9% by weight, of the enantiomer. In certain embodiments, the weights are based upon total weight of all enantiomers or stereoisomers of the compound.

[0044] In the compositions provided herein, an enantiomerically pure compound can be present with other active or inactive ingredients. For example, a pharmaceutical composition comprising an enantiomerically pure R-compound can comprise, for example, about 90% excipient and about 10% enantiomerically pure R-compound. In certain embodiments, the enantiomerically pure R-compound in such compositions can, for example, comprise, at least about 95% by weight R-compound and at most about 5% by weight S-compound, by total weight of the compound. For example, a pharmaceutical composition comprising an enantiomerically pure S-compound can comprise, for example, about 90% excipient and about 10% enantiomerically pure S-compound. In certain embodiments, the enantiomerically pure S-compound in such compositions can, for example, comprise, at least about 95% by weight S-compound and at most about 5% by weight R-compound, by total weight of the compound.

[0045] In some embodiments, a diastereomerically pure compound can be present with other active or inactive ingredients. For example, a pharmaceutical composition comprising a diastereometerically pure exo compound can comprise, for example, about 90% excipient and about 10% diastereometerically pure exo compound. In certain embodiments, the diastereometerically pure exo compound in such compositions can, for example, comprise, at least about 95% by weight exo compound and at most about 5% by weight endo compound, by total weight of the compound. For example, a pharmaceutical composition comprising a diastereometerically pure endo compound can comprise, for example, about 90% excipient and about 10% diastereometerically pure endo compound. In certain embodiments, the diastereometerically pure endo compound in such compositions can, for example, comprise, at least about 95% by weight endo compound and at most about 5% by weight exo compound, by total weight of the compound.

[0046] In some embodiments, an isomerically pure compound can be present with other active or inactive ingredients. For example, a pharmaceutical composition comprising a isomerically pure exo compound can comprise, for example, about 90% excipient and about 10% isomerically pure exo compound. In certain embodiments, the isomerically pure exo compound in such compositions can, for example, comprise, at least about 95% by weight exo compound and at most about 5% by weight endo compound, by total weight of the compound. For example, a pharmaceutical composition comprising an isomerically pure endo compound can comprise, for example, about 90% excipient and about 10% isomerically pure endo compound. In certain embodiments, the isomerically pure endo compound in such compositions can, for example, comprise, at least about 95% by weight endo compound and at most about 5% by weight exo compound, by total weight of the compound.

[0047] In certain embodiments, the active ingredient can be formulated with little or no excipient or carrier.

[0048] Compound described herein may also comprise one or more isotopic substitutions. For example, H may be in any isotopic form, including ¹H, ²H (D or deuterium), and ³H (T or tritium); C may be in any isotopic form, including ¹²C, ¹³C, and ¹⁴C; O may be in any isotopic form, including ¹⁶O and ¹⁸O; N may be in any isotopic form, including ¹⁴N and ¹⁵N; F may be in any isotopic form, including ¹⁸F, ¹⁹F, and the like.

[0049] The term “pharmaceutically acceptable salt” is meant to include salts of the active compounds that are prepared with relatively nontoxic acids or bases, depending on the particular substituents found on the compounds described herein. When compounds of the present disclosure contain relatively acidic functionalities, base addition salts can be obtained by contacting the neutral form of such compounds with a sufficient amount of the desired base, either neat or in a suitable inert solvent. Examples of pharmaceutically acceptable base addition salts include sodium, potassium, calcium, ammonium, organic amino, or magnesium salt, or a similar salt. When compounds of the present invention contain relatively basic functionalities, acid addition salts can be obtained by contacting the neutral form of such compounds with a sufficient amount of the desired acid, either neat or in a suitable inert solvent. Examples of pharmaceutically acceptable acid addition salts include those derived from inorganic acids like hydrochloric, hydrobromic, nitric, carbonic, monohydrogencarbonic, phosphoric, monohydrogenphosphoric, dihydrogenphosphoric, sulfuric, monohydrogensulfuric, hydriodic, or phosphorous acids and the like, as well as the salts derived from organic acids like acetic, propionic, isobutyric, maleic, malonic, benzoic, succinic, suberic, fumaric, lactic, mandelic, phthalic, benzenesulfonic, p-tolylsulfonic, citric, tartaric, methanesulfonic, and the like. Also included are salts of amino acids such as arginate and the like, and salts of organic acids like glucuronic or galactunoric acids and the like (see, e.g., Berge et al, Journal of Pharmaceutical Science 66: 1-19 (1977)). Certain specific compounds of the present invention contain both basic and acidic functionalities that allow the compounds to be converted into either base or acid addition salts. These salts may be prepared by methods known to those skilled in the art. Other pharmaceutically acceptable carriers known to those of skill in the art are suitable for the present invention.

[0050] In addition to salt forms, the present disclosure provides compounds in a prodrug form. Prodrugs of the compounds described herein are those compounds that readily undergo chemical changes under physiological conditions to provide the compounds of the present invention. Additionally, prodrugs can be converted to the compounds of the present invention by chemical or biochemical methods in an ex vivo environment. For example, prodrugs can be slowly converted to the compounds of the present invention when placed in a transdermal patch reservoir with a suitable enzyme or chemical reagent.

[0051] The term “solvate” refers to forms of the compound that are associated with a solvent, usually by a solvolysis reaction. This physical association may include hydrogen bonding. Conventional solvents include water, methanol, ethanol, acetic acid, DMSO, THF, diethyl ether, and the like. The compounds of Formula (I) may be prepared, e.g., in crystalline form, and may be solvated. Suitable solvates include pharmaceutically acceptable solvates and further include both stoichiometric solvates and non-stoichiometric solvates. In certain instances, the solvate will be capable of isolation, for example, when one or more solvent molecules are incorporated in the crystal lattice of a crystalline solid. “Solvate” encompasses both solution-phase and isolable solvates. Representative solvates include hydrates, ethanolates, and methanolates.

[0052] The term “hydrate” refers to a compound which is associated with water. Typically, the number of the water molecules contained in a hydrate of a compound is in a definite ratio to the number of the compound molecules in the hydrate. Therefore, a hydrate of a compound may be represented, for example, by the general formula R·x H₂O, wherein R is the compound and wherein x is a number greater than 0. A given compound may form more than one type of hydrates, including, e.g., monohydrates (x is 1), lower hydrates (x is a number greater than 0 and smaller than 1, e.g., hemihydrates (R·0.5 H₂O)), and polyhydrates (x is a number greater than 1, e.g., dihydrates (R·2 H₂O) and hexahydrates (R·6 H₂O)).

[0053] The term “tautomer” refers to compounds that are interchangeable forms of a particular compound structure, and that vary in the displacement of hydrogen atoms and electrons. Thus, two structures may be in equilibrium through the movement of π electrons and an atom (usually H). For example, enols and ketones are tautomers because they are rapidly interconverted by treatment with either acid or base. Another example of tautomerism is the aci- and nitro-forms of phenylnitromethane that are likewise formed by treatment with acid or base. Tautomeric forms may be relevant to the attainment of the optimal chemical reactivity and biological activity of a compound of interest.

### Other Definitions

[0054] The following definitions are more general terms used throughout the present disclosure.

[0055] The articles “a” and “an” refer to one or more than one (e.g., to at least one) of the grammatical object of the article. By way of example, “an element” means one element or more than one element. The term “and/or” means either “and” or “or” unless indicated otherwise.

[0056] The term “about” is used herein to mean within the typical ranges of tolerances in the art. For example, “about” can be understood as about 2 standard deviations from the mean. In certain embodiments, about means ±10%. In certain embodiments, about means ±5%. When about is present before a series of numbers or a range, it is understood that “about” can modify each of the numbers in the series or range.

[0057] “Acquire” or “acquiring” as used herein, refer to obtaining possession of a value, e.g., a numerical value, or image, or a physical entity (e.g., a sample), by “directly acquiring” or “indirectly acquiring” the value or physical entity. “Directly acquiring” means performing a process (e.g., performing an analytical method or protocol) to obtain the value or physical entity. “Indirectly acquiring” refers to receiving the value or physical entity from another party or source (e.g., a third-party laboratory that directly acquired the physical entity or value). Directly acquiring a value or physical entity includes performing a process that includes a physical change in a physical substance or the use of a machine or device. Examples of directly acquiring a value include obtaining a sample from a human subject. Directly acquiring a value includes performing a process that uses a machine or device, e.g., mass spectrometer to acquire mass spectrometry data.

[0058] The terms “administer,” “administering,” or “administration,” as used herein refers to implanting, absorbing, ingesting, injecting, inhaling, or otherwise introducing an inventive compound, or a pharmaceutical composition thereof.

[0059] As used herein, the terms “condition,” “disease,” and “disorder” are used interchangeably.

[0060] An “effective amount” of a compound of Formula (I) refers to an amount sufficient to elicit the desired biological response, i.e., treating the condition. As will be appreciated by those of ordinary skill in this art, the effective amount of a compound of Formula (I) may vary depending on such factors as the desired biological endpoint, the pharmacokinetics of the compound, the condition being treated, the mode of administration, and the age and health of the subject. An effective amount encompasses therapeutic and prophylactic treatment. For example, in treating cancer, an effective amount of an inventive compound may reduce the tumor burden or stop the growth or spread of a tumor.

[0061] A “therapeutically effective amount” of a compound of Formula (I) is an amount sufficient to provide a therapeutic benefit in the treatment of a condition or to delay or minimize one or more symptoms associated with the condition. In some embodiments, a therapeutically effective amount is an amount sufficient to provide a therapeutic benefit in the treatment of a condition or to minimize one or more symptoms associated with the condition. A therapeutically effective amount of a compound means an amount of therapeutic agent, alone or in combination with other therapies, which provides a therapeutic benefit in the treatment of the condition. The term “therapeutically effective amount” can encompass an amount that improves overall therapy, reduces or avoids symptoms or causes of the condition, or enhances the therapeutic efficacy of another therapeutic agent.

[0062] The terms “peptide,” “polypeptide,” and “protein” are used interchangeably, and refer to a compound comprised of amino acid residues covalently linked by peptide bonds. A protein or peptide must contain at least two amino acids, and no limitation is placed on the maximum number of amino acids that can comprised therein. Polypeptides include any peptide or protein comprising two or more amino acids joined to each other by peptide bonds. As used herein, the term refers to both short chains, which also commonly are referred to in the art as peptides, oligopeptides and oligomers, for example, and to longer chains, which generally are referred to in the art as proteins, of which there are many types.

[0063] “Prevention,” “prevent,” and “preventing” as used herein refers to a treatment that comprises administering a therapy, e.g., administering a compound described herein (e.g., a compound of Formula (I)) prior to the onset of a disease, disorder, or condition in order to preclude the physical manifestation of said disease, disorder, or condition. In some embodiments, “prevention,” “prevent,” and “preventing” require that signs or symptoms of the disease, disorder, or condition have not yet developed or have not yet been observed. In some embodiments, treatment comprises prevention and in other embodiments it does not.

[0064] A “subject” to which administration is contemplated includes, but is not limited to, humans (i.e., a male or female of any age group, e.g., a pediatric subject (e.g., infant, child, adolescent) or adult subject (e.g., young adult, middle-aged adult, or senior adult)) and/or other non-human animals, for example, mammals (e.g., primates (e.g., cynomolgus monkeys, rhesus monkeys); commercially relevant mammals such as cattle, pigs, horses, sheep, goats, cats, and/or dogs) and birds (e.g., commercially relevant birds such as chickens, ducks, geese, and/or turkeys). In certain embodiments, the animal is a mammal. The animal may be a male or female and at any stage of development. A non-human animal may be a transgenic animal.

[0065] As used herein, the terms “treatment,” “treat,” and “treating” refer to reversing, alleviating, delaying the onset of, or inhibiting the progress of one or more of a symptom, manifestation, or underlying cause of a disease, disorder, or condition (e.g., as described herein), e.g., by administering a therapy, e.g., administering a compound described herein (e.g., a compound of Formula (I)). In an embodiment, treating comprises reducing, reversing, alleviating, delaying the onset of, or inhibiting the progress of a symptom of a disease, disorder, or condition. In an embodiment, treating comprises reducing, reversing, alleviating, delaying the onset of, or inhibiting the progress of a manifestation of a disease, disorder, or condition. In an embodiment, treating comprises reducing, reversing, alleviating, reducing, or delaying the onset of, an underlying cause of a disease, disorder, or condition. In some embodiments, “treatment,” “treat,” and “treating” require that signs or symptoms of the disease, disorder, or condition have developed or have been observed. In other embodiments, treatment may be administered in the absence of signs or symptoms of the disease or condition, e.g., in preventive treatment. For example, treatment may be administered to a susceptible individual prior to the onset of symptoms (e.g., in light of a history of symptoms and/or in light of genetic or other susceptibility factors). Treatment may also be continued after symptoms have resolved, for example, to delay or prevent recurrence. Treatment may also be continued after symptoms have resolved, for example, to delay or prevent recurrence. In some embodiments, treatment comprises prevention and in other embodiments it does not.

[0066] A “proliferative disease” refers to a disease that occurs due to abnormal extension by the multiplication of cells (Walker, Cambridge Dictionary of Biology; Cambridge University Press: Cambridge, UK, 1990). A proliferative disease may be associated with: 1) the pathological proliferation of normally quiescent cells; 2) the pathological migration of cells from their normal location (e.g., metastasis of neoplastic cells); 3) the pathological expression of proteolytic enzymes such as the matrix metalloproteinases (e.g., collagenases, gelatinases, and elastases); 4) the pathological angiogenesis as in proliferative retinopathy and tumor metastasis; or 5) evasion of host immune surveillance and elimination of neoplastic cells. Exemplary proliferative diseases include cancers (i.e., “malignant neoplasms”), benign neoplasms, and angiogenesis.

[0067] A “non-proliferative disease” refers to a disease that does not primarily extend through the abnormal multiplication of cells. A non-proliferative disease may be associated with any cell type or tissue type in a subject. Exemplary non-proliferative diseases include neurological diseases or disorders (e.g., a repeat expansion disease); autoimmune disease or disorders; immunodeficiency diseases or disorders; lysosomal storage diseases or disorders; inflammatory diseases or disorders; cardiovascular conditions, diseases, or disorders; metabolic diseases or disorders; respiratory conditions, diseases, or disorders; renal diseases or disorders; and infectious diseases.

### Compounds

[0068] The present disclosure features a compound of Formula (I):

[chemical structure]

or a pharmaceutically acceptable salt, solvate, hydrate, tautomer, or stereoisomer thereof, A and B are each independently cycloalkyl, heterocyclyl, aryl, or heteroaryl, each of which is optionally substituted with one or more R¹; L is absent, C₁-C₆-alkylene, C₁-C₆-heteroalkylene, C(O), or —C(O)N(R^{B})—, wherein each alkylene and heteroalkylene is optionally substituted with one or more R⁸; W, X, Z¹, and Z² are each independently C(R³) or N, wherein at least one of W and X is N; each R¹ is independently hydrogen, C₁-C₆-alkyl, C₂-C₆-alkenyl, C₂-C₆-alkynyl, C₁-C₆-heteroalkyl, C₁-C₆-haloalkyl, cycloalkyl, heterocyclyl, aryl, C₁-C₆ alkylene-aryl, C₂-C₆ alkenylene-aryl, C₁-C₆ heteroalkylene-aryl, heteroaryl, C₁-C₆ alkylene-heteroaryl, C₁-C₆ heteroalkylene-heteroaryl, halo, cyano, oxo, —OR^{A}, —NR^{B}R^{C}, —NR^{B}C(O)R^{D}, —NO₂, —C(O)NR^{B}R^{C}, —C(O)R^{D}, —C(O)OR^{D}, or —S(O)ₓR^{D}, wherein each alkyl, alkylene, alkenyl, alkynyl, heteroalkyl, haloalkyl, cycloalkyl, heterocyclyl, aryl, and heteroaryl is optionally substituted with one or more R⁴; or two R¹ groups, together with the atoms to which they are attached, form a 3-7-membered cycloalkyl, heterocyclyl, aryl, or heteroaryl, wherein each cycloalkyl, heterocyclyl, aryl, and heteroaryl is optionally substituted with one or more R⁴; R² is hydrogen, C₁-C₆-alkyl, C₂-C₆-alkenyl, C₂-C₆-alkynyl, C₁-C₆-heteroalkyl, C₁-C₆-haloalkyl, cycloalkyl, heterocyclyl, aryl, heteroaryl, halo, cyano, —C(O)R^{D}, or —OR^{A}; wherein each alkyl, alkenyl, alkynyl, heteroalkyl, haloalkyl, cycloalkyl, heterocyclyl, aryl, and heteroaryl is optionally substituted with one or more R⁵; R³ is hydrogen, C₁-C₆-alkyl, C₂-C₆-alkenyl, C₂-C₆-alkynyl, C₁-C₆-heteroalkyl, C₁-C₆-haloalkyl, cycloalkyl, heterocyclyl, aryl, heteroaryl, halo, cyano, —C(O)R^{D}, or —OR^{A}; wherein each alkyl, alkenyl, alkynyl, heteroalkyl, haloalkyl, cycloalkyl, heterocyclyl, aryl, and heteroaryl is optionally substituted with one or more R⁵; each R⁴ is independently C₁-C₆-alkyl, C₂-C₆-alkenyl, C₂-C₆-alkynyl, C₁-C₆-heteroalkyl, C₁-C₆-haloalkyl, cycloalkyl, heterocyclyl, aryl, heteroaryl, halo, cyano, oxo, —OR^{A}, —NR^{B}R^{C}, —NR^{B}C(O)R^{D}, —NO₂, —C(O)NR^{B}R^{C}, —C(O)R^{D}, —C(O)OR^{D}, or —S(O)ₓR^{D}, wherein each alkyl, alkenyl, alkynyl, heteroalkyl, haloalkyl, cycloalkyl, heterocyclyl, aryl, and heteroaryl is optionally substituted with one or more R⁶; each R⁵ is C₁-C₆-alkyl, C₂-C₆-alkenyl, C₂-C₆-alkynyl, C₁-C₆-heteroalkyl, C₁-C₆-haloalkyl, cycloalkyl, heterocyclyl, aryl, heteroaryl, halo, cyano, oxo, —OR^{A}, —NR^{B}R^{C}, —NR^{B}C(O)R^{D}, —NO₂, —C(O)NR^{B}R^{C}, —C(O)R^{D}, —C(O)OR^{D}, or —S(O)ₓR^{D}; each R⁶ is independently C₁-C₆-alkyl, C₁-C₆-heteroalkyl, C₁-C₆-haloalkyl, cycloalkyl, heterocyclyl, aryl, heteroaryl, halo, cyano, oxo, or —OR^{A}; each R^{A} is independently hydrogen, C₁-C₆ alkyl, C₂-C₆ alkenyl, C₂-C₆ alkynyl, C₁-C₆ haloalkyl, C₁-C₆ heteroalkyl, cycloalkyl, heterocyclyl, aryl, heteroaryl, C₁-C₆ alkylene-aryl, C₁-C₆ alkylene-heteroaryl, —C(O)R^{D}, or —S(O)ₓR^{D}; each of R^{B} and R^{C} is independently hydrogen, C₁-C₆ alkyl, C₂-C₆ alkenyl, C₂-C₆ alkynyl, C₁-C₆ heteroalkyl, C₁-C₆ haloalkyl, cycloalkyl, heterocyclyl, aryl, heteroaryl, —C(O)R^{D}, or —S(O)ₓR^{D}; or R^{B} and R^{C} together with the atom to which they are attached form a 3-7-membered heterocyclyl ring optionally substituted with one or more R⁷; each R^{D} is independently hydrogen, C₁-C₆ alkyl, C₂-C₆ alkenyl, C₂-C₆ alkynyl, C₁-C₆ heteroalkyl, C₁-C₆ haloalkyl, cycloalkyl, heterocyclyl, aryl, heteroaryl, C₁-C₆ alkylene-aryl, or C₁-C₆ alkylene-heteroaryl; each R⁷ and R⁸ is independently C₁-C₆-alkyl, halo, cyano, oxo, or —OR^{A1}; each R^{A1} is hydrogen or C₁-C₆-alkyl; and x is 0, 1, or 2

[0069] As generally described herein, A and B, are each independently cycloalkyl, heterocyclyl, aryl, or heteroaryl, each of which is optionally substituted with one or more R¹.

[0070] In some embodiments, each of A and B are independently a monocyclic ring, e.g., monocyclic cycloalkyl, monocyclic heterocyclyl, monocyclic aryl, or monocyclic heteroaryl. The monocyclic ring may be saturated, partially unsaturated, or fully unsaturated (e.g., aromatic). In some embodiments, A or B are independently a monocyclic ring comprising between 3 and 10 ring atoms (e.g., 3, 4, 5, 6, 7, 8, 9, or 10 ring atoms). In some embodiments, A is a 4-membered monocyclic ring. In some embodiments, B is a 4-membered monocyclic ring. In some embodiments, A is a 5-membered monocyclic ring. In some embodiments, B is a 5-membered monocyclic ring. In some embodiments, A is a 6-membered monocyclic ring. In some embodiments, B is a 6-membered monocyclic ring. In some embodiments, A is a 7-membered monocyclic ring. In some embodiments, B is a 7-membered monocyclic ring. In some embodiments, A is an 8-membered monocyclic ring. In some embodiments, B is an 8-membered monocyclic ring. In some embodiments, A or B are independently a monocyclic ring optionally substituted with one or more R¹.

[0071] In some embodiments, A or B are independently a bicyclic ring, e.g., bicyclic cycloalkyl, bicyclic heterocyclyl, bicyclic aryl, or bicyclic heteroaryl. The bicyclic ring may be saturated, partially unsaturated, or fully unsaturated (e.g., aromatic). In some embodiments, A or B are independently a bicyclic ring comprising a fused, bridged, or spiro ring system. In some embodiments, A or B are independently a bicyclic ring comprising between 4 and 18 ring atoms (e.g., 4, 5, 6, 7, 8, 9, 10, 11, 12, 13, 14, 15, 16, 17, or 18 ring atoms). In some embodiments, A is a 6-membered bicyclic ring. In some embodiments, B is a 6-membered bicyclic ring. In some embodiments, A is a 7-membered bicyclic ring. In some embodiments, B is a 7-membered bicyclic ring. In some embodiments, A is an 8-membered bicyclic ring. In some embodiments, B is an 8-membered bicyclic ring. In some embodiments, A is a 9-membered bicyclic ring. In some embodiments, B is a 9-membered bicyclic ring. In some embodiments, A is a 10-membered bicyclic ring. In some embodiments, B is a 10-membered bicyclic ring. In some embodiments, A is an 11-membered bicyclic ring. In some embodiments, B is an 11-membered bicyclic ring. In some embodiments, A is a 12-membered bicyclic ring. In some embodiments, B is a 12-membered bicyclic ring. In some embodiments, A or B are independently a bicyclic ring optionally substituted with one or more R¹.

[0072] In some embodiments, A or B are independently a tricyclic ring, e.g., tricyclic cycloalkyl, tricyclic heterocyclyl, tricyclic aryl, or tricyclic heteroaryl. The tricyclic ring may be saturated, partially unsaturated, or fully unsaturated (e.g., aromatic). In some embodiments, A or B are independently a tricyclic ring that comprises a fused, bridged, or spiro ring system, or a combination thereof. In some embodiments, A or B are independently a tricyclic ring comprising between 6 and 24 ring atoms (e.g., 6, 7, 8, 9, 10, 11, 12, 13, 14, 15, 16, 17, 18, 19, 20, 21, 22, 23, or 24 ring atoms). In some embodiments, A is an 8-membered tricyclic ring. In some embodiments, B is an 8-membered tricyclic ring. In some embodiments, A is a 9-membered tricyclic ring. In some embodiments, B is a 9-membered tricyclic ring. In some embodiments, A is a 10-membered tricyclic ring. In some embodiments, B is a 10-membered tricyclic ring. In some embodiments, A or B are independently a tricyclic ring optionally substituted with one or more R¹.

[0073] In some embodiments, A or B are independently monocyclic cycloalkyl, monocyclic heterocyclyl, monocyclic aryl, or monocyclic heteroaryl. In some embodiments, A or B are independently bicyclic cycloalkyl, bicyclic heterocyclyl, bicyclic aryl, or bicyclic heteroaryl. In some embodiments, A or B are independently tricyclic cycloalkyl, tricyclic heterocyclyl, tricyclic aryl, or tricyclic heteroaryl. In some embodiments, A is monocyclic heterocyclyl. In some embodiments, B is monocyclic heterocyclyl. In some embodiments, A is bicyclic heterocyclyl. In some embodiments, B is bicyclic heterocyclyl. In some embodiments, A is monocyclic heteroaryl. In some embodiments, B is monocyclic heteroaryl. In some embodiments, A is bicyclic heteroaryl. In some embodiments, B is bicyclic heteroaryl.

[0074] In some embodiments, A or B are independently a nitrogen-containing heterocyclyl, e.g., heterocyclyl comprising one or more nitrogen atom. The one or more nitrogen atom of the nitrogen-containing heterocyclyl may be at any position of the ring. In some embodiments, the nitrogen-containing heterocyclyl is monocyclic, bicyclic, or tricyclic. In some embodiments, A or B are independently heterocyclyl comprising at least 1, at least 2, at least 3, at least 4, at least 5, or at least 6 nitrogen atoms. In some embodiments, A is heterocyclyl comprising 1 nitrogen atom. In some embodiments, B is heterocyclyl comprising 1 nitrogen atom. In some embodiments, A is heterocyclyl comprising 2 nitrogen atoms. In some embodiments, B is heterocyclyl comprising 2 nitrogen atoms. In some embodiments, A is heterocyclyl comprising 3 nitrogen atoms. In some embodiments, B is heterocyclyl comprising 3 nitrogen atoms. In some embodiments, A is heterocyclyl comprising 4 nitrogen atoms. In some embodiments, B is heterocyclyl comprising 4 nitrogen atoms. In some embodiments, A or B are independently a nitrogen-containing heterocyclyl comprising one or more additional heteroatoms, e.g., one or more of oxygen, sulfur, boron, silicon, or phosphorus. In some embodiments, the one or more nitrogen of the nitrogen-containing heterocyclyl is substituted, e.g., with R¹.

[0075] In some embodiments, A or B are independently a nitrogen-containing heteroaryl, e.g., heteroaryl comprising one or more nitrogen atom. The one or more nitrogen atom of the nitrogen-containing heteroaryl may be at any position of the ring. In some embodiments, the nitrogen-containing heteroaryl is monocyclic, bicyclic, or tricyclic. In some embodiments, A or B are independently heteroaryl comprising at least 1, at least 2, at least 3, at least 4, at least 5, or at least 6 nitrogen atoms. In some embodiments, A is heteroaryl comprising 1 nitrogen atom. In some embodiments, B is heteroaryl comprising 1 nitrogen atom. In some embodiments, A is heteroaryl comprising 2 nitrogen atoms. In some embodiments, B is heteroaryl comprising 2 nitrogen atoms. In some embodiments, A is heteroaryl comprising 3 nitrogen atoms. In some embodiments, B is heteroaryl comprising 3 nitrogen atoms. In some embodiments, A is heteroaryl comprising 4 nitrogen atoms. In some embodiments, B is heteroaryl comprising 4 nitrogen atoms. In some embodiments, A or B are independently a nitrogen-containing heteroaryl comprising one or more additional heteroatoms, e.g., one or more of oxygen, sulfur, boron, silicon, or phosphorus. In some embodiments, the one or more nitrogen of the nitrogen-containing heteroaryl is substituted, e.g., with R¹.

[0076] In some embodiments, A is a 6-membered nitrogen-containing heterocyclyl, e.g., a 6-membered heterocyclyl comprising one or more nitrogen. In some embodiments, A is a 6-membered heterocyclyl comprising 1 nitrogen atom. In some embodiments, A is a 6-membered heterocyclyl comprising 2 nitrogen atoms. In some embodiments, A is a 6-membered heterocyclyl comprising 3 nitrogen atoms. In some embodiments, A is a 6-membered heterocyclyl comprising 4 nitrogen atoms. The one or more nitrogen atom of the 6-membered nitrogen-containing heterocyclyl may be at any position of the ring. In some embodiments, A is a 6-membered nitrogen-containing heterocyclyl optionally substituted with one or more R¹. In some embodiments, the one or more nitrogen of the 6-membered nitrogen-containing heterocyclyl is substituted, e.g., with R¹. In some embodiments, A is a 6-membered nitrogen-containing heterocyclyl comprising one or more additional heteroatoms, e.g., one or more of oxygen, sulfur, boron, silicon, or phosphorus.

[0077] In some embodiments, B is a 5-membered nitrogen-containing heterocyclyl or heteroaryl, e.g., a 5-membered heterocyclyl or heteroaryl comprising one or more nitrogen. In some embodiments, B is a 5-membered heterocyclyl comprising 1 nitrogen atom. In some embodiments, B is a 5-membered heteroaryl comprising 1 nitrogen atom. In some embodiments, B is a 5-membered heterocyclyl comprising 2 nitrogen atoms. In some embodiments, B is a 5-membered heteroaryl comprising 2 nitrogen atoms. In some embodiments, B is a 5-membered heterocyclyl comprising 3 nitrogen atoms. In some embodiments, B is a 5-membered heteroaryl comprising 3 nitrogen atoms. The one or more nitrogen atom of the 5-membered nitrogen-containing heterocyclyl or heteroaryl may be at any position of the ring. In some embodiments, B is a 5-membered nitrogen-containing heterocyclyl optionally substituted with one or more R¹.

[0078] In some embodiments, B is a 5-membered nitrogen-containing heteroaryl optionally substituted with one or more R¹. In some embodiments, the one or more nitrogen of the 5-membered nitrogen-containing heterocyclyl or heteroaryl is substituted, e.g., with R¹. In some embodiments, B is a 5-membered nitrogen-containing heterocyclyl or heteroaryl comprising one or more additional heteroatoms, e.g., one or more of oxygen, sulfur, boron, silicon, or phosphorus.

[0079] In some embodiments, B is a nitrogen-containing bicyclic heteroaryl (e.g., a 9-membered nitrogen-containing bicyclic heteroaryl), that is optionally substituted with one or more R¹. In some embodiments, B is a 9-membered bicyclic heteroaryl comprising 1 nitrogen atom. In some embodiments, B is a 9-membered bicyclic heteroaryl comprising 2 nitrogen atoms. In some embodiments, B is a 9-membered bicyclic heteroaryl comprising 3 nitrogen atoms. In some embodiments, B is a 9-membered bicyclic heteroaryl comprising 4 nitrogen atoms. The one or more nitrogen atom of the 9-membered bicyclic heteroaryl may be at any position of the ring. In some embodiments, B is a 9-membered bicyclic heteroaryl substituted with one or more R¹.

[0080] In some embodiments, each of A and B are independently selected from:

[chemical structure]

[chemical structure]

[chemical structure]

[chemical structure]

[chemical structure]

[chemical structure]

[chemical structure]

[chemical structure]

[chemical structure]

[chemical structure]

[chemical structure]

[chemical structure]

[chemical structure]

[chemical structure]

[chemical structure]

[chemical structure]

[chemical structure]

[chemical structure]

[chemical structure]

[chemical structure]

wherein each R¹ is as defined herein. In an embodiment, A and B are each independently a saturated, partially saturated, or unsaturated (e.g., aromatic) derivative of one of the rings described above. In an embodiment, A and B are each independently a stereoisomer of one of the rings described above.

[0081] In some embodiments, each of A and B are independently selected from:

[chemical structure]

[chemical structure]

[chemical structure]

[chemical structure]

[chemical structure]

wherein each R¹ is as defined herein. In an embodiment, A and B are each independently a saturated, partially saturated, or unsaturated (e.g., aromatic) derivative of one of the rings described above. In an embodiment, A and B are each independently a stereoisomer of one of the rings described above.

[0082] In some embodiments, one of A and B is independently selected from

[chemical structure]

wherein R¹ is as described herein.
In some embodiments, one of A and B is independently selected from

[chemical structure]

and wherein R¹ is as described herein. In some embodiments, one of A and B is independently selected from

[chemical structure]

wherein each R¹ is independently C₁-C₆-alkyl, C₁-C₆-heteroalkyl, C₁-C₆-haloalkyl, halo, cyano, or —OR^{A}, and each alkyl, heteroalkyl, and haloalkyl is optionally substituted with one or more R⁴. In some embodiments, one of A and B is independently selected from

[chemical structure]

wherein each R¹ is independently C₁-C₆-alkyl, C₁-C₆-heteroalkyl, C₁-C₆-haloalkyl, halo, cyano, or —OR^{A}, and each alkyl, heteroalkyl, and haloalkyl is optionally substituted with one or more R⁷. In some embodiments, one of A and B is independently

[chemical structure]

wherein each R^{1a} is independently C₁-C₆-alkyl, C₁-C₆-heteroalkyl, C₁-C₆-haloalkyl, halo, cyano, or —OR^{A}, and each alkyl, heteroalkyl, and haloalkyl is optionally substituted with one or more R⁷. In some embodiments, one of A and B is independently selected from

[chemical structure]

[chemical structure]

In some embodiments, one of A and B is independently selected from

[chemical structure]

[chemical structure]

In some embodiments, one of A and B is independently selected from

[chemical structure]

In some embodiments, one of A and B is independently

[chemical structure]

[0083] In some embodiments, one of A and B is independently a monocyclic heterocyclyl or bicyclic heterocyclyl, each of which is optionally substituted with one or more R¹. In some embodiments, one of A and B is independently a nitrogen-containing heterocyclyl optionally substituted with one or more R¹. In some embodiments, one of A and B is independently a 4-8 membered heterocyclyl optionally substituted with one or more R¹. In some embodiments, one of A and B is independently selected from

[chemical structure]

wherein R¹ is as described herein. In some embodiments, one of A and B is independently selected from

[chemical structure]

wherein R¹ is as described herein. In some embodiments, one of A and B is

[chemical structure]

wherein R¹ is as described herein. In some embodiments, A is selected from

[chemical structure]

wherein R¹ is as described herein. In some embodiments, B is selected from

[chemical structure]

wherein R¹ is as described herein. In some embodiments, B is selected from

[chemical structure]

wherein R¹ is as described herein.
In some embodiments, one of A and B is independently selected from

[chemical structure]

[chemical structure]

In some embodiments, one of A and B is independently selected from

[chemical structure]

In some embodiments, A is selected one of A and B is independently selected from

[chemical structure]

In some embodiments, one of A and B is

[chemical structure]

[0084] In some embodiments, X is N. In some embodiments, W is N. In some embodiments, both of W and X is independently N. In some embodiments, Z¹ is C(R³) (e.g., CH). In some embodiments, Z¹ is N. In some embodiments, X is N and W, Z¹, and Z² are each independently C(R³). In some embodiments, X and Z¹ are each independently N and W and Z² are C(R³). In some embodiments, X and W are each independently N and Z¹ is C(R³). In some embodiments, each of W, X, and Z¹ are each independently N, and Z¹ is C(R³).

[0085] In some embodiments, R¹ is hydrogen. In some embodiments, R¹ is C₁-C₆-alkyl. In some embodiments, R¹ is C₂-C₆-alkenyl. In some embodiments, R¹ is C₂-C₆-alkynyl. In some embodiments, R¹ is C₁-C₆-heteroalkyl. In some embodiments, R¹ is C₁-C₆-haloalkyl (e.g., —CF₃). In some embodiments, R¹ is C₁-alkyl (e.g., methyl). In some embodiments, R¹ is unsubstituted C₁-C₆-alkyl, unsubstituted C₂-C₆-alkenyl, unsubstituted C₂-C₆-alkynyl, unsubstituted C₁-C₆-heteroalkyl, or unsubstituted C₁-C₆-haloalkyl. In some embodiments, R¹ is C₁-C₆-alkyl substituted with one or more R⁵. In some embodiments, R¹ is C₂-C₆-alkenyl substituted with one or more R⁵. In some embodiments, R¹ is C₂-C₆-alkynyl substituted with one or more R⁵. In some embodiments, R¹ is C₁-C₆-heteroalkyl substituted with one or more R⁵. In some embodiments, R¹ is C₁-C₆-haloalkyl substituted with one or more R⁵. In some embodiments, R¹ is methyl.

[0086] In some embodiments, R¹ is cycloalkyl (e.g., 3-7 membered cycloalkyl). In some embodiments, R¹ is heterocyclyl (e.g., 3-7 membered heterocyclyl). In some embodiments, R¹ is aryl. In some embodiments, R¹ is C₁-C₆ alkylene-aryl (e.g., benzyl). In some embodiments, R¹ is C₁-C₆ alkenylene-aryl. In some embodiments, R¹ is C₁-C₆ alkylene-heteroaryl. In some embodiments, R¹ is heteroaryl. In some embodiments, R¹ is unsubstituted cycloalkyl, unsubstituted heterocyclyl, unsubstituted aryl, unsubstituted C₁-C₆ alkylene-aryl, unsubstituted C₁-C₆ alkenylene-aryl, unsubstituted C₁-C₆ alkylene-heteroaryl, or unsubstituted heteroaryl. In some embodiments, R¹ is cycloalkyl substituted with one or more R⁵. In some embodiments, R¹ is heterocyclyl substituted with one or more R⁵. In some embodiments, R¹ is aryl substituted with one or more R⁵. In some embodiments, R¹ is C₁-C₆ alkylene-aryl substituted with one or more R⁵. In some embodiments, R¹ is C₁-C₆ alkenylene-aryl substituted with one or more R⁵. In some embodiments, R¹ is C₁-C₆ alkylene-heteroaryl substituted with one or more R⁵. In some embodiments, R¹ is heteroaryl substituted with one or more R⁵.

[0087] In some embodiments, R¹ is —OR^{A}. In some embodiments, R¹ is —NR^{B}R^{C} (e.g., NH₂ or NMe₂). In some embodiments, R¹ is —NR^{B}C(O)R^{D}. In some embodiments, R¹ is-C(O)NR^{B}R^{C}. In some embodiments, R¹ is —C(O)R^{D}. In some embodiments, R¹ is —C(O)OR^{D}. In some embodiments, R¹ is —SR^{E}. In some embodiments, R¹ is —S(O)ₓR^{D}. In some embodiments, R¹ is halo, e.g., fluoro, chloro, bromo, or iodo. In some embodiments, R¹ is cyano. In some embodiments, R¹ is nitro (—NO₂). In some embodiments, R¹ is oxo.

[0088] In some embodiments, two R¹ groups, together with the atoms to which they are attached, form a 3-7-membered cycloalkyl. In some embodiments, two R¹ groups, together with the atoms to which they are attached, form a 3-7-membered heterocyclyl. In some embodiments, two R¹ groups, together with the atoms to which they are attached, form a 5- or 6-membered aryl. In some embodiments, two R¹ groups, together with the atoms to which they are attached, form a 5- or 6-membered heteroaryl. The cycloalkyl, heterocyclyl, aryl, or heteroaryl may be substituted with one or more R⁵.

[0089] In some embodiments, R³ is hydrogen. In some embodiments, R³ is C₁-C₆ alkyl. In some embodiments, R³ is C₁-C₆ haloalkyl. In some embodiments, R³ is methyl.

[0090] In some embodiments, L is absent. In some embodiments, L is C₁-C₆-alkylene optionally substituted with one or more R⁸. In some embodiments, L is C₁-C₆-heteroalkylene optionally substituted with one or more R⁸. In some embodiments, L is C(O). In some embodiments, L is —C(O)N(R^{B})—.

[0091] In some embodiments, R⁵ is C₁-C₆-alkyl. In some embodiments, R⁵ is C₂-C₆-alkenyl. In some embodiments, R⁵ is C₂-C₆-alkynyl. In some embodiments, R⁵ is C₁-C₆-heteroalkyl. In some embodiments, R⁵ is C₁-C₆-haloalkyl. In some embodiments, R⁵ is unsubstituted C₁-C₆-alkyl, unsubstituted C₂-C₆-alkenyl, unsubstituted C₂-C₆-alkynyl, unsubstituted C₁-C₆-haloalkyl, or unsubstituted C₁-C₆-heteroalkyl. In some embodiments, R⁵ is C₁-C₆-alkyl substituted with one or more R⁶. In some embodiments, R⁵ is C₂-C₆-alkenyl substituted with one or more R⁶. In some embodiments, R⁵ is C₂-C₆-alkynyl substituted with one or more R⁶. In some embodiments, R⁵ is C₁-C₆-haloalkyl substituted with one or more R⁶. In some embodiments, R⁵ is C₁-C₆-heteroalkyl substituted with one or more R⁶.

[0092] In some embodiments, R⁵ is cycloalkyl. In some embodiments, R⁵ is heterocyclyl. In some embodiments, R⁵ is aryl. In some embodiments, R⁵ is heteroaryl. In some embodiments, R⁵ is unsubstituted cycloalkyl, unsubstituted heterocyclyl, unsubstituted aryl, or unsubstituted heteroaryl. In some embodiments, R⁵ is cycloalkyl substituted with one or more R⁶. In some embodiments, R⁵ is heterocyclyl substituted with one or more R⁶. In some embodiments, R⁵ is aryl substituted with one or more R⁶. In some embodiments, R⁵ is heteroaryl substituted with one or more R⁶.

[0093] In some embodiments, R⁵ is halo (e.g., fluoro, chloro, bromo, or iodo). In some embodiments, R⁵ is cyano. In some embodiments, R⁵ is oxo. In some embodiments, R⁵ is —OR^{A}. In some embodiments, R⁵ is —NR^{B}R^{C}. In some embodiments, R⁵ is —NR^{B}C(O)R^{D}. In some embodiments, R⁵ is —NO₂. In some embodiments, R⁵ is —C(O)NR^{B}R^{C}. In some embodiments, R⁵ is —C(O)R^{D}. In some embodiments, R⁵ is —C(O)OR^{D}. In some embodiments, R⁵ is —SR^{E}. In some embodiments, R⁵ is —S(O)ₓR^{D}.

[0094] In some embodiments, R⁶ is C₁-C₆-alkyl. In some embodiments, R⁶ is C₁-C₆-heteroalkyl. In some embodiments, R⁶ is C₁-C₆-haloalkyl (e.g., —CF₃ or —CHF₂). In some embodiments, R⁶ is cycloalkyl. In some embodiments, R⁶ is heterocyclyl. In some embodiments, R⁶ is aryl. In some embodiments, R⁶ is heteroaryl. In some embodiments, R⁶ is halo. In some embodiments, R⁶ is cyano. In some embodiments, R⁶ is oxo. In some embodiments, R⁶ is —OR^{A}.

[0095] In some embodiments, R^{A} is hydrogen. In some embodiments, R^{A} is C₁-C₆ alkyl (e.g., methyl). In some embodiments, R^{A} is C₁-C₆ haloalkyl. In some embodiments, R^{A} is aryl. In some embodiments, R^{A} is heteroaryl. In some embodiments, R^{A} is C₁-C₆ alkylene-aryl (e.g., benzyl). In some embodiments, R^{A} is C₁-C₆ alkylene-heteroaryl. In some embodiments, R^{A} is C(O)R^{D}. In some embodiments, R^{A} is —S(O)ₓR^{D}.

[0096] In some embodiments, R^{B}, R^{C}, or both are independently hydrogen, C₁-C₆-alkyl, C₁-C₆-heteroalkyl, cycloalkyl, heterocyclyl, or —OR^{A}. In some embodiments, each of R^{B} and R^{C} is independently hydrogen. In some embodiments, each of R^{B} and R^{C} is independently C₁-C₆ alkyl. In some embodiments, one of R^{B} and R^{C} is hydrogen, and the other of R^{B} and R^{C} is C₁-C₆ alkyl. In some embodiments, R^{B} and R^{C} together with the atom to which they are attached form a 3-7-membered heterocyclyl ring optionally substituted with one or more of R⁷ (e.g., 1, 2, or 3 R⁷).

[0097] In some embodiments, R^{D} is hydrogen, C₁-C₆ alkyl, C₂-C₆ alkenyl, C₂-C₆ alkynyl, C₁-C₆ heteroalkyl, C₁-C₆ haloalkyl, cycloalkyl, heterocyclyl, aryl, heteroaryl, C₁-C₆ alkylene-aryl (e.g., benzyl), or C₁-C₆ alkylene-heteroaryl. In some embodiments, R^{D} is hydrogen. In some embodiments, R^{D} is C₁-C₆ alkyl (e.g., methyl). In some embodiments, R^{D} is C₁-C₆ heteroalkyl. In some embodiments, R^{D} is C₁-C₆ haloalkyl. In some embodiments, R^{D} is cycloalkyl. In some embodiments, R^{D} is heterocyclyl. In some embodiments, R^{D} is aryl. In some embodiments, R^{E} is aryl. In some embodiments, R^{D} is heteroaryl. In some embodiments, R^{D} is C₁-C₆ alkylene-aryl (e.g., benzyl). In some embodiments, R^{D} is C₁-C₆ alkylene-heteroaryl.

[0098] In some embodiments, x is an integer between 0 and 2 (e.g., 0, 1, or 2). In some embodiments, x is 0. In some embodiments, x is 1. In some embodiments, x is 2.

[0099] In some embodiments, the compound of Formula (I) is a compound of Formula (I-a):

[chemical structure]

or a pharmaceutically acceptable salt, solvate, hydrate, tautomer, or stereoisomer thereof, A and B are each independently cycloalkyl, heterocyclyl, aryl, or heteroaryl, each of which is optionally substituted with one or more R¹; W, X, Z¹, and Z² are each independently C(R³) or N, wherein at least one of W and X is N; each R¹ is independently hydrogen, C₁-C₆-alkyl, C₂-C₆-alkenyl, C₂-C₆-alkynyl, C₁-C₆-heteroalkyl, C₁-C₆-haloalkyl, cycloalkyl, heterocyclyl, aryl, C₁-C₆ alkylene-aryl, C₂-C₆ alkenylene-aryl, C₁-C₆ heteroalkylene-aryl, heteroaryl, C₁-C₆ alkylene-heteroaryl, C₁-C₆ heteroalkylene-heteroaryl, halo, cyano, oxo, —OR^{A}, —NR^{B}R^{C}, —NR^{B}C(O)R^{D}, —NO₂, —C(O)NR^{B}R^{C}, —C(O)R^{D}, —C(O)OR^{D}, or —S(O)ₓR^{D}, wherein each alkyl, alkylene, alkenyl, alkynyl, heteroalkyl, haloalkyl, cycloalkyl, heterocyclyl, aryl, and heteroaryl is optionally substituted with one or more R⁴; or two R¹ groups, together with the atoms to which they are attached, form a 3-7-membered cycloalkyl, heterocyclyl, aryl, or heteroaryl, wherein each cycloalkyl, heterocyclyl, aryl, and heteroaryl is optionally substituted with one or more R⁴; each R² is independently hydrogen, C₁-C₆-alkyl, C₂-C₆-alkenyl, C₂-C₆-alkynyl, C₁-C₆-heteroalkyl, C₁-C₆-haloalkyl, cycloalkyl, heterocyclyl, aryl, heteroaryl, halo, cyano, or —OR^{A}; R³ is hydrogen, C₁-C₆-alkyl, C₂-C₆-alkenyl, C₂-C₆-alkynyl, C₁-C₆-heteroalkyl, C₁-C₆-haloalkyl, cycloalkyl, heterocyclyl, aryl, heteroaryl, —C(O)R^{D}, or —OR^{A}; wherein each alkyl, alkenyl, alkynyl, heteroalkyl, haloalkyl, cycloalkyl, heterocyclyl, aryl, and heteroaryl is optionally substituted with one or more R⁵; each R⁴ is independently C₁-C₆-alkyl, C₂-C₆-alkenyl, C₂-C₆-alkynyl, C₁-C₆-heteroalkyl, C₁-C₆-haloalkyl, cycloalkyl, heterocyclyl, aryl, heteroaryl, halo, cyano, oxo, —OR^{A}, —NR^{B}R^{C}, —NR^{B}C(O)R^{D}, —NO₂, —C(O)NR^{B}R^{C}, —C(O)R^{D}, —C(O)OR^{D}, or —S(O)ₓR^{D}, wherein each alkyl, alkenyl, alkynyl, heteroalkyl, haloalkyl, cycloalkyl, heterocyclyl, aryl, and heteroaryl is optionally substituted with one or more R⁶; each R⁵ is C₁-C₆-alkyl, C₂-C₆-alkenyl, C₂-C₆-alkynyl, C₁-C₆-heteroalkyl, C₁-C₆-haloalkyl, cycloalkyl, heterocyclyl, aryl, heteroaryl, halo, cyano, oxo, —OR^{A}, —NR^{B}R^{C}, —NR^{B}C(O)R^{D}, —NO₂, —C(O)NR^{B}R^{C}, —C(O)R^{D}, —C(O)OR^{D}, or —S(O)ₓR^{D}; each R⁶ is independently C₁-C₆-alkyl, C₁-C₆-heteroalkyl, C₁-C₆-haloalkyl, cycloalkyl, heterocyclyl, aryl, heteroaryl, halo, cyano, oxo, or —OR^{A}; each R^{A} is independently hydrogen, C₁-C₆ alkyl, C₂-C₆ alkenyl, C₂-C₆ alkynyl, C₁-C₆ haloalkyl, C₁-C₆ heteroalkyl, cycloalkyl, heterocyclyl, aryl, heteroaryl, C₁-C₆ alkylene-aryl, C₁-C₆ alkylene-heteroaryl, —C(O)R^{D}, or —S(O)ₓR^{D}; each of R^{B} and R^{C} is independently hydrogen, C₁-C₆ alkyl, C₂-C₆ alkenyl, C₂-C₆ alkynyl, C₁-C₆ heteroalkyl, C₁-C₆ haloalkyl, cycloalkyl, heterocyclyl, aryl, heteroaryl, —C(O)R^{D}, or —S(O)ₓR^{D}; or R^{B} and R^{C} together with the atom to which they are attached form a 3-7-membered heterocyclyl ring optionally substituted with one or more R⁷; each R^{D} is independently hydrogen, C₁-C₆ alkyl, C₂-C₆ alkenyl, C₂-C₆ alkynyl, C₁-C₆ heteroalkyl, C₁-C₆ haloalkyl, cycloalkyl, heterocyclyl, aryl, heteroaryl, C₁-C₆ alkylene-aryl, or C₁-C₆ alkylene-heteroaryl; each R⁷ is C₁-C₆-alkyl, halo, cyano, oxo, or —OR^{A1}; each R^{A1} is hydrogen or C₁-C₆-alkyl; and x is 0, 1, or 2.

[0100] In some embodiments, the compound of Formula (I) is a compound of Formula (I-b):

[chemical structure]

or a pharmaceutically acceptable salt, solvate, hydrate, tautomer, or stereoisomer thereof, wherein A and B are each independently cycloalkyl, heterocyclyl, aryl, or heteroaryl, each of which is optionally substituted with one or more R¹; W, X, Z¹, and Z² are each independently C(R³) or N, wherein at least one of W and X is N; each R¹ is independently hydrogen, C₁-C₆-alkyl, C₂-C₆-alkenyl, C₂-C₆-alkynyl, C₁-C₆-heteroalkyl, C₁-C₆-haloalkyl, cycloalkyl, heterocyclyl, aryl, C₁-C₆ alkylene-aryl, C₂-C₆ alkenylene-aryl, C₁-C₆ heteroalkylene-aryl, heteroaryl, C₁-C₆ alkylene-heteroaryl, C₁-C₆ heteroalkylene-heteroaryl, halo, cyano, oxo, —OR^{A}, —NR^{B}R^{C}, —NR^{B}C(O)R^{D}, —NO₂, —C(O)NR^{B}R^{C}, —C(O)R^{D}, —C(O)OR^{D}, or —S(O)ₓR^{D}, wherein each alkyl, alkylene, alkenyl, alkynyl, heteroalkyl, haloalkyl, cycloalkyl, heterocyclyl, aryl, and heteroaryl is optionally substituted with one or more R⁴; or two R¹ groups, together with the atoms to which they are attached, form a 3-7-membered cycloalkyl, heterocyclyl, aryl, or heteroaryl, wherein each cycloalkyl, heterocyclyl, aryl, and heteroaryl is optionally substituted with one or more R⁴; each R² is independently hydrogen, C₁-C₆-alkyl, C₂-C₆-alkenyl, C₂-C₆-alkynyl, C₁-C₆-heteroalkyl, C₁-C₆-haloalkyl, cycloalkyl, heterocyclyl, aryl, heteroaryl, halo, cyano, or —OR^{A}; R³ is hydrogen, C₁-C₆-alkyl, C₂-C₆-alkenyl, C₂-C₆-alkynyl, C₁-C₆-heteroalkyl, C₁-C₆-haloalkyl, cycloalkyl, heterocyclyl, aryl, heteroaryl, —C(O)R^{D}, or —OR^{A}; wherein each alkyl, alkenyl, alkynyl, heteroalkyl, haloalkyl, cycloalkyl, heterocyclyl, aryl, and heteroaryl is optionally substituted with one or more R⁵; each R⁴ is independently C₁-C₆-alkyl, C₂-C₆-alkenyl, C₂-C₆-alkynyl, C₁-C₆-heteroalkyl, C₁-C₆-haloalkyl, cycloalkyl, heterocyclyl, aryl, heteroaryl, halo, cyano, oxo, —OR^{A}, —NR^{B}R^{C}, —NR^{B}C(O)R^{D}, —NO₂, —C(O)NR^{B}R^{C}, —C(O)R^{D}, —C(O)OR^{D}, or —S(O)ₓR^{D}, wherein each alkyl, alkenyl, alkynyl, heteroalkyl, haloalkyl, cycloalkyl, heterocyclyl, aryl, and heteroaryl is optionally substituted with one or more R⁶; each R⁵ is C₁-C₆-alkyl, C₂-C₆-alkenyl, C₂-C₆-alkynyl, C₁-C₆-heteroalkyl, C₁-C₆-haloalkyl, cycloalkyl, heterocyclyl, aryl, heteroaryl, halo, cyano, oxo, —OR^{A}, —NR^{B}R^{C}, —NR^{B}C(O)R^{D}, —NO₂, —C(O)NR^{B}R^{C}, —C(O)R^{D}, —C(O)OR^{D}, or —S(O)ₓR^{D}; each R⁶ is independently C₁-C₆-alkyl, C₁-C₆-heteroalkyl, C₁-C₆-haloalkyl, cycloalkyl, heterocyclyl, aryl, heteroaryl, halo, cyano, oxo, or —OR^{A}; each R^{A} is independently hydrogen, C₁-C₆ alkyl, C₂-C₆ alkenyl, C₂-C₆ alkynyl, C₁-C₆ haloalkyl, C₁-C₆ heteroalkyl, cycloalkyl, heterocyclyl, aryl, heteroaryl, C₁-C₆ alkylene-aryl, C₁-C₆ alkylene-heteroaryl, —C(O)R^{D}, or —S(O)ₓR^{D}; each of R^{B} and R^{C} is independently hydrogen, C₁-C₆ alkyl, C₂-C₆ alkenyl, C₂-C₆ alkynyl, C₁-C₆ heteroalkyl, C₁-C₆ haloalkyl, cycloalkyl, heterocyclyl, aryl, heteroaryl, —C(O)R^{D}, or —S(O)ₓR^{D}; or R^{B} and R^{C} together with the atom to which they are attached form a 3-7-membered heterocyclyl ring optionally substituted with one or more R⁷; each R^{D} is independently hydrogen, C₁-C₆ alkyl, C₂-C₆ alkenyl, C₂-C₆ alkynyl, C₁-C₆ heteroalkyl, C₁-C₆ haloalkyl, cycloalkyl, heterocyclyl, aryl, heteroaryl, C₁-C₆ alkylene-aryl, or C₁-C₆ alkylene-heteroaryl; each R⁷ is C₁-C₆-alkyl, halo, cyano, oxo, or —OR^{A1}; each R^{A1} is hydrogen or C₁-C₆-alkyl; and x is 0, 1, or 2.

[0101] In some embodiments, the compound of Formula (I) is a compound of Formula (I-c):

[chemical structure]

or a pharmaceutically acceptable salt, solvate, hydrate, tautomer, or stereoisomer thereof, wherein A and B are each independently cycloalkyl, heterocyclyl, aryl, or heteroaryl, each of which is optionally substituted with one or more R¹; W and Z¹ are each independently C(R³) or N; each R¹ is independently hydrogen, C₁-C₆-alkyl, C₂-C₆-alkenyl, C₂-C₆-alkynyl, C₁-C₆-heteroalkyl, C₁-C₆-haloalkyl, cycloalkyl, heterocyclyl, aryl, C₁-C₆ alkylene-aryl, C₂-C₆ alkenylene-aryl, C₁-C₆ heteroalkylene-aryl, heteroaryl, C₁-C₆ alkylene-heteroaryl, C₁-C₆ heteroalkylene-heteroaryl, halo, cyano, oxo, —OR^{A}, —NR^{B}R^{C}, —NR^{B}C(O)R^{D}, —NO₂, —C(O)NR^{B}R^{C}, —C(O)R^{D}, —C(O)OR^{D}, or —S(O)ₓR^{D}, wherein each alkyl, alkylene, alkenyl, alkynyl, heteroalkyl, haloalkyl, cycloalkyl, heterocyclyl, aryl, and heteroaryl is optionally substituted with one or more R⁴; or two R¹ groups, together with the atoms to which they are attached, form a 3-7-membered cycloalkyl, heterocyclyl, aryl, or heteroaryl, wherein each cycloalkyl, heterocyclyl, aryl, and heteroaryl is optionally substituted with one or more R⁴; each R² is independently hydrogen, C₁-C₆-alkyl, C₂-C₆-alkenyl, C₂-C₆-alkynyl, C₁-C₆-heteroalkyl, C₁-C₆-haloalkyl, cycloalkyl, heterocyclyl, aryl, heteroaryl, halo, cyano, or —OR^{A}; R³ is hydrogen, C₁-C₆-alkyl, C₂-C₆-alkenyl, C₂-C₆-alkynyl, C₁-C₆-heteroalkyl, C₁-C₆-haloalkyl, cycloalkyl, heterocyclyl, aryl, heteroaryl, —C(O)R^{D}, or —OR^{A}; wherein each alkyl, alkenyl, alkynyl, heteroalkyl, haloalkyl, cycloalkyl, heterocyclyl, aryl, and heteroaryl is optionally substituted with one or more R⁵; each R⁴ is independently C₁-C₆-alkyl, C₂-C₆-alkenyl, C₂-C₆-alkynyl, C₁-C₆-heteroalkyl, C₁-C₆-haloalkyl, cycloalkyl, heterocyclyl, aryl, heteroaryl, halo, cyano, oxo, —OR^{A}, —NR^{B}R^{C}, —NR^{B}C(O)R^{D}, —NO₂, —C(O)NR^{B}R^{C}, —C(O)R^{D}, —C(O)OR^{D}, or —S(O)ₓR^{D}, wherein each alkyl, alkenyl, alkynyl, heteroalkyl, haloalkyl, cycloalkyl, heterocyclyl, aryl, and heteroaryl is optionally substituted with one or more R⁶; each R⁵ is C₁-C₆-alkyl, C₂-C₆-alkenyl, C₂-C₆-alkynyl, C₁-C₆-heteroalkyl, C₁-C₆-haloalkyl, cycloalkyl, heterocyclyl, aryl, heteroaryl, halo, cyano, oxo, —OR^{A}, —NR^{B}R^{C}, —NR^{B}C(O)R^{D}, —NO₂, —C(O)NR^{B}R^{C}, —C(O)R^{D}, —C(O)OR^{D}, or —S(O)ₓR^{D}; each R⁶ is independently C₁-C₆-alkyl, C₁-C₆-heteroalkyl, C₁-C₆-haloalkyl, cycloalkyl, heterocyclyl, aryl, heteroaryl, halo, cyano, oxo, or —OR^{A}; each R^{A} is independently hydrogen, C₁-C₆ alkyl, C₂-C₆ alkenyl, C₂-C₆ alkynyl, C₁-C₆ haloalkyl, C₁-C₆ heteroalkyl, cycloalkyl, heterocyclyl, aryl, heteroaryl, C₁-C₆ alkylene-aryl, C₁-C₆ alkylene-heteroaryl, —C(O)R^{D}, or —S(O)ₓR^{D}; each of R^{B} and R^{C} is independently hydrogen, C₁-C₆ alkyl, C₂-C₆ alkenyl, C₂-C₆ alkynyl, C₁-C₆ heteroalkyl, C₁-C₆ haloalkyl, cycloalkyl, heterocyclyl, aryl, heteroaryl, —C(O)R^{D}, or —S(O)ₓR^{D}; or R^{B} and R^{C} together with the atom to which they are attached form a 3-7-membered heterocyclyl ring optionally substituted with one or more R⁷; each R^{D} is independently hydrogen, C₁-C₆ alkyl, C₂-C₆ alkenyl, C₂-C₆ alkynyl, C₁-C₆ heteroalkyl, C₁-C₆ haloalkyl, cycloalkyl, heterocyclyl, aryl, heteroaryl, C₁-C₆ alkylene-aryl, or C₁-C₆ alkylene-heteroaryl; each R⁷ is C₁-C₆-alkyl, halo, cyano, oxo, or —OR^{A1}; each R^{A1} is hydrogen or C₁-C₆-alkyl; and x is 0, 1, or 2.

[0102] In some embodiments, the compound of Formula (I) is a compound of Formula (I-d):

[chemical structure]

or a pharmaceutically acceptable salt, solvate, hydrate, tautomer, or stereoisomer thereof, wherein A and B are each independently cycloalkyl, heterocyclyl, aryl, or heteroaryl, each of which is optionally substituted with one or more R¹; W and Z² are each independently C(R³) or N; each R¹ is independently hydrogen, C₁-C₆-alkyl, C₂-C₆-alkenyl, C₂-C₆-alkynyl, C₁-C₆-heteroalkyl, C₁-C₆-haloalkyl, cycloalkyl, heterocyclyl, aryl, C₁-C₆ alkylene-aryl, C₂-C₆ alkenylene-aryl, C₁-C₆ heteroalkylene-aryl, heteroaryl, C₁-C₆ alkylene-heteroaryl, C₁-C₆ heteroalkylene-heteroaryl, halo, cyano, oxo, —OR^{A}, —NR^{B}R^{C}, —NR^{B}C(O)R^{D}, —NO₂, —C(O)NR^{B}R^{C}, —C(O)R^{D}, —C(O)OR^{D}, or —S(O)ₓR^{D}, wherein each alkyl, alkylene, alkenyl, alkynyl, heteroalkyl, haloalkyl, cycloalkyl, heterocyclyl, aryl, and heteroaryl is optionally substituted with one or more R⁴; or two R¹ groups, together with the atoms to which they are attached, form a 3-7-membered cycloalkyl, heterocyclyl, aryl, or heteroaryl, wherein each cycloalkyl, heterocyclyl, aryl, and heteroaryl is optionally substituted with one or more R⁴; R² is C₁-C₆-alkyl, C₂-C₆-alkenyl, C₂-C₆-alkynyl, C₁-C₆-heteroalkyl, C₁-C₆-haloalkyl, cycloalkyl, heterocyclyl, aryl, heteroaryl, halo, cyano, or —OR^{A}; R³ is hydrogen, C₁-C₆-alkyl, C₂-C₆-alkenyl, C₂-C₆-alkynyl, C₁-C₆-heteroalkyl, C₁-C₆-haloalkyl, cycloalkyl, heterocyclyl, aryl, heteroaryl, —C(O)R^{D}, or —OR^{A}; wherein each alkyl, alkenyl, alkynyl, heteroalkyl, haloalkyl, cycloalkyl, heterocyclyl, aryl, and heteroaryl is optionally substituted with one or more R⁵; each R⁴ is independently C₁-C₆-alkyl, C₂-C₆-alkenyl, C₂-C₆-alkynyl, C₁-C₆-heteroalkyl, C₁-C₆-haloalkyl, cycloalkyl, heterocyclyl, aryl, heteroaryl, halo, cyano, oxo, —OR^{A}, —NR^{B}R^{C}, —R^{B}C(O)R^{D}, —NO₂, —C(O)NR^{B}R^{C}, —C(O)R^{D}, —C(O)OR^{D}, or —S(O)ₓR^{D}, wherein each alkyl, alkenyl, alkynyl, heteroalkyl, haloalkyl, cycloalkyl, heterocyclyl, aryl, and heteroaryl is optionally substituted with one or more R⁶; each R⁵ is C₁-C₆-alkyl, C₂-C₆-alkenyl, C₂-C₆-alkynyl, C₁-C₆-heteroalkyl, C₁-C₆-haloalkyl, cycloalkyl, heterocyclyl, aryl, heteroaryl, halo, cyano, oxo, —OR^{A}, —NR^{B}R^{C}, —NR^{B}C(O)R^{D}, —NO₂, —C(O)NR^{B}R^{C}, —C(O)R^{D}, —C(O)OR^{D}, or —S(O)ₓR^{D}; each R⁶ is independently C₁-C₆-alkyl, C₁-C₆-heteroalkyl, C₁-C₆-haloalkyl, cycloalkyl, heterocyclyl, aryl, heteroaryl, halo, cyano, oxo, or —OR^{A}; each R^{A} is independently hydrogen, C₁-C₆ alkyl, C₂-C₆ alkenyl, C₂-C₆ alkynyl, C₁-C₆ haloalkyl, C₁-C₆ heteroalkyl, cycloalkyl, heterocyclyl, aryl, heteroaryl, C₁-C₆ alkylene-aryl, C₁-C₆ alkylene-heteroaryl, —C(O)R^{D}, or —S(O)ₓR^{D}; each of R^{B} and R^{C} is independently hydrogen, C₁-C₆ alkyl, C₂-C₆ alkenyl, C₂-C₆ alkynyl, C₁-C₆ heteroalkyl, C₁-C₆ haloalkyl, cycloalkyl, heterocyclyl, aryl, heteroaryl, —C(O)R^{D}, or —S(O)ₓR^{D}; or R^{B} and R^{C} together with the atom to which they are attached form a 3-7-membered heterocyclyl ring optionally substituted with one or more R⁷; each R^{D} is independently hydrogen, C₁-C₆ alkyl, C₂-C₆ alkenyl, C₂-C₆ alkynyl, C₁-C₆ heteroalkyl, C₁-C₆ haloalkyl, cycloalkyl, heterocyclyl, aryl, heteroaryl, C₁-C₆ alkylene-aryl, or C₁-C₆ alkylene-heteroaryl; each R⁷ is C₁-C₆-alkyl, halo, cyano, oxo, or —OR^{A1}; each R^{A1} is hydrogen or C₁-C₆-alkyl; and x is 0, 1, or 2.

[0103] In some embodiments, the compound of Formula (I) is a compound of Formula (I-e):

[chemical structure]

or a pharmaceutically acceptable salt, solvate, hydrate, tautomer, or stereoisomer thereof, wherein A and B are each independently cycloalkyl, heterocyclyl, aryl, or heteroaryl, each of which is optionally substituted with one or more R¹; W is C(R³) or N; each R¹ is independently hydrogen, C₁-C₆-alkyl, C₂-C₆-alkenyl, C₂-C₆-alkynyl, C₁-C₆-heteroalkyl, C₁-C₆-haloalkyl, cycloalkyl, heterocyclyl, aryl, C₁-C₆ alkylene-aryl, C₂-C₆ alkenylene-aryl, C₁-C₆ heteroalkylene-aryl, heteroaryl, C₁-C₆ alkylene-heteroaryl, C₁-C₆ heteroalkylene-heteroaryl, halo, cyano, oxo, —OR^{A}, —NR^{B}R^{C}, —NR^{B}C(O)R^{D}, —NO₂, —C(O)NR^{B}R^{C}, —C(O)R^{D}, —C(O)OR^{D}, or —S(O)ₓR^{D}, wherein each alkyl, alkylene, alkenyl, alkynyl, heteroalkyl, haloalkyl, cycloalkyl, heterocyclyl, aryl, and heteroaryl is optionally substituted with one or more R⁴; or two R¹ groups, together with the atoms to which they are attached, form a 3-7-membered cycloalkyl, heterocyclyl, aryl, or heteroaryl, wherein each cycloalkyl, heterocyclyl, aryl, and heteroaryl is optionally substituted with one or more R⁴; each R² is independently hydrogen, C₁-C₆-alkyl, C₂-C₆-alkenyl, C₂-C₆-alkynyl, C₁-C₆-heteroalkyl, C₁-C₆-haloalkyl, cycloalkyl, heterocyclyl, aryl, heteroaryl, halo, cyano, or —OR^{A}; R³ is hydrogen, C₁-C₆-alkyl, C₂-C₆-alkenyl, C₂-C₆-alkynyl, C₁-C₆-heteroalkyl, C₁-C₆-haloalkyl, cycloalkyl, heterocyclyl, aryl, heteroaryl, —C(O)R^{D}, or —OR^{A}; wherein each alkyl, alkenyl, alkynyl, heteroalkyl, haloalkyl, cycloalkyl, heterocyclyl, aryl, and heteroaryl is optionally substituted with one or more R⁵; each R⁴ is independently C₁-C₆-alkyl, C₂-C₆-alkenyl, C₂-C₆-alkynyl, C₁-C₆-heteroalkyl, C₁-C₆-haloalkyl, cycloalkyl, heterocyclyl, aryl, heteroaryl, halo, cyano, oxo, —OR^{A}, —NR^{B}R^{C}, —NR^{B}C(O)R^{D}, —NO₂, —C(O)NR^{B}R^{C}, —C(O)R^{D}, —C(O)OR^{D}, or —S(O)ₓR^{D}, wherein each alkyl, alkenyl, alkynyl, heteroalkyl, haloalkyl, cycloalkyl, heterocyclyl, aryl, and heteroaryl is optionally substituted with one or more R⁶; each R⁵ is C₁-C₆-alkyl, C₂-C₆-alkenyl, C₂-C₆-alkynyl, C₁-C₆-heteroalkyl, C₁-C₆-haloalkyl, cycloalkyl, heterocyclyl, aryl, heteroaryl, halo, cyano, oxo, —OR^{A}, —NR^{B}R^{C}, —NR^{B}C(O)R^{D}, —NO₂, —C(O)NR^{B}R^{C}, —C(O)R^{D}, —C(O)OR^{D}, or —S(O)ₓR^{D}; each R⁶ is independently C₁-C₆-alkyl, C₁-C₆-heteroalkyl, C₁-C₆-haloalkyl, cycloalkyl, heterocyclyl, aryl, heteroaryl, halo, cyano, oxo, or —OR^{A}; each R^{A} is independently hydrogen, C₁-C₆ alkyl, C₂-C₆ alkenyl, C₂-C₆ alkynyl, C₁-C₆ haloalkyl, C₁-C₆ heteroalkyl, cycloalkyl, heterocyclyl, aryl, heteroaryl, C₁-C₆ alkylene-aryl, C₁-C₆ alkylene-heteroaryl, —C(O)R^{D}, or —S(O)ₓR^{D}; each of R^{B} and R^{C} is independently hydrogen, C₁-C₆ alkyl, C₂-C₆ alkenyl, C₂-C₆ alkynyl, C₁-C₆ heteroalkyl, C₁-C₆ haloalkyl, cycloalkyl, heterocyclyl, aryl, heteroaryl, —C(O)R^{D}, or —S(O)ₓR^{D}; or R^{B} and R^{C} together with the atom to which they are attached form a 3-7-membered heterocyclyl ring optionally substituted with one or more R⁷; each R^{D} is independently hydrogen, C₁-C₆ alkyl, C₂-C₆ alkenyl, C₂-C₆ alkynyl, C₁-C₆ heteroalkyl, C₁-C₆ haloalkyl, cycloalkyl, heterocyclyl, aryl, heteroaryl, C₁-C₆ alkylene-aryl, or C₁-C₆ alkylene-heteroaryl; each R⁷ is C₁-C₆-alkyl, halo, cyano, oxo, or —OR^{A1}; each R^{A1} is hydrogen or C₁-C₆-alkyl; and x is 0, 1, or 2.

[0104] In some embodiments, the compound of Formula (I) is a compound of Formula (I-f):

[chemical structure]

or a pharmaceutically acceptable salt, solvate, hydrate, tautomer, or stereoisomer thereof, wherein A and B are each independently cycloalkyl, heterocyclyl, aryl, or heteroaryl, each of which is optionally substituted with one or more R¹; W is C(R³) or N; each R¹ is independently hydrogen, C₁-C₆-alkyl, C₂-C₆-alkenyl, C₂-C₆-alkynyl, C₁-C₆-heteroalkyl, C₁-C₆-haloalkyl, cycloalkyl, heterocyclyl, aryl, C₁-C₆ alkylene-aryl, C₂-C₆ alkenylene-aryl, C₁-C₆ heteroalkylene-aryl, heteroaryl, C₁-C₆ alkylene-heteroaryl, C₁-C₆ heteroalkylene-heteroaryl, halo, cyano, oxo, —OR^{A}, —NR^{B}R^{C}, —NR^{B}C(O)R^{D}, —NO₂, —C(O)NR^{B}R^{C}, —C(O)R^{D}, —C(O)OR^{D}, or —S(O)ₓR^{D}, wherein each alkyl, alkylene, alkenyl, alkynyl, heteroalkyl, haloalkyl, cycloalkyl, heterocyclyl, aryl, and heteroaryl is optionally substituted with one or more R⁴; or two R¹ groups, together with the atoms to which they are attached, form a 3-7-membered cycloalkyl, heterocyclyl, aryl, or heteroaryl, wherein each cycloalkyl, heterocyclyl, aryl, and heteroaryl is optionally substituted with one or more R⁴; each R² is independently hydrogen, C₁-C₆-alkyl, C₂-C₆-alkenyl, C₂-C₆-alkynyl, C₁-C₆-heteroalkyl, C₁-C₆-haloalkyl, cycloalkyl, heterocyclyl, aryl, heteroaryl, halo, cyano, or —OR^{A}; R³ is hydrogen, C₁-C₆-alkyl, C₂-C₆-alkenyl, C₂-C₆-alkynyl, C₁-C₆-heteroalkyl, C₁-C₆-haloalkyl, cycloalkyl, heterocyclyl, aryl, heteroaryl, —C(O)R^{D}, or —OR^{A}; wherein each alkyl, alkenyl, alkynyl, heteroalkyl, haloalkyl, cycloalkyl, heterocyclyl, aryl, and heteroaryl is optionally substituted with one or more R⁵; each R⁴ is independently C₁-C₆-alkyl, C₂-C₆-alkenyl, C₂-C₆-alkynyl, C₁-C₆-heteroalkyl, C₁-C₆-haloalkyl, cycloalkyl, heterocyclyl, aryl, heteroaryl, halo, cyano, oxo, —OR^{A}, —NR^{B}R^{C}, —NR^{B}C(O)R^{D}, —NO₂, —C(O)NR^{B}R^{C}, —C(O)R^{D}, —C(O)OR^{D}, or —S(O)ₓR^{D}, wherein each alkyl, alkenyl, alkynyl, heteroalkyl, haloalkyl, cycloalkyl, heterocyclyl, aryl, and heteroaryl is optionally substituted with one or more R⁶; each R⁵ is C₁-C₆-alkyl, C₂-C₆-alkenyl, C₂-C₆-alkynyl, C₁-C₆-heteroalkyl, C₁-C₆-haloalkyl, cycloalkyl, heterocyclyl, aryl, heteroaryl, halo, cyano, oxo, —OR^{A}, —NR^{B}R^{C}, —NR^{B}C(O)R^{D}, —NO₂, —C(O)NR^{B}R^{C}, —C(O)R^{D}, —C(O)OR^{D}, or —S(O)ₓR^{D}; each R⁶ is independently C₁-C₆-alkyl, C₁-C₆-heteroalkyl, C₁-C₆-haloalkyl, cycloalkyl, heterocyclyl, aryl, heteroaryl, halo, cyano, oxo, or —OR^{A}; each R^{A} is independently hydrogen, C₁-C₆ alkyl, C₂-C₆ alkenyl, C₂-C₆ alkynyl, C₁-C₆ haloalkyl, C₁-C₆ heteroalkyl, cycloalkyl, heterocyclyl, aryl, heteroaryl, C₁-C₆ alkylene-aryl, C₁-C₆ alkylene-heteroaryl, —C(O)R^{D}, or —S(O)ₓR^{D}; each of R^{B} and R^{C} is independently hydrogen, C₁-C₆ alkyl, C₂-C₆ alkenyl, C₂-C₆ alkynyl, C₁-C₆ heteroalkyl, C₁-C₆ haloalkyl, cycloalkyl, heterocyclyl, aryl, heteroaryl, —C(O)R^{D}, or —S(O)ₓR^{D}; or R^{B} and R^{C} together with the atom to which they are attached form a 3-7-membered heterocyclyl ring optionally substituted with one or more R⁷; each R^{D} is independently hydrogen, C₁-C₆ alkyl, C₂-C₆ alkenyl, C₂-C₆ alkynyl, C₁-C₆ heteroalkyl, C₁-C₆ haloalkyl, cycloalkyl, heterocyclyl, aryl, heteroaryl, C₁-C₆ alkylene-aryl, or C₁-C₆ alkylene-heteroaryl; each R⁷ is C₁-C₆-alkyl, halo, cyano, oxo, or —OR^{A1}; each R^{A1} is hydrogen or C₁-C₆-alkyl; and x is 0, 1, or 2.

[0105] In some embodiments, the compound of Formula (I) is a compound of Formula (I-g):

[chemical structure]

or a pharmaceutically acceptable salt, solvate, hydrate, tautomer, or stereoisomer thereof, wherein A and B are each independently cycloalkyl, heterocyclyl, aryl, or heteroaryl, each of which is optionally substituted with one or more R¹; W is C(R³) or N; each R¹ is independently hydrogen, C₁-C₆-alkyl, C₂-C₆-alkenyl, C₂-C₆-alkynyl, C₁-C₆-heteroalkyl, C₁-C₆-haloalkyl, cycloalkyl, heterocyclyl, aryl, C₁-C₆ alkylene-aryl, C₂-C₆ alkenylene-aryl, C₁-C₆ heteroalkylene-aryl, heteroaryl, C₁-C₆ alkylene-heteroaryl, C₁-C₆ heteroalkylene-heteroaryl, halo, cyano, oxo, —OR^{A}, —NR^{B}R^{C}, —NR^{B}C(O)R^{D}, —NO₂, —C(O)NR^{B}R^{C}, —C(O)R^{D}, —C(O)OR^{D}, or —S(O)ₓR^{D}, wherein each alkyl, alkylene, alkenyl, alkynyl, heteroalkyl, haloalkyl, cycloalkyl, heterocyclyl, aryl, and heteroaryl is optionally substituted with one or more R⁴; or two R¹ groups, together with the atoms to which they are attached, form a 3-7-membered cycloalkyl, heterocyclyl, aryl, or heteroaryl, wherein each cycloalkyl, heterocyclyl, aryl, and heteroaryl is optionally substituted with one or more R⁴; R² is C₁-C₆-alkyl, C₂-C₆-alkenyl, C₂-C₆-alkynyl, C₁-C₆-heteroalkyl, C₁-C₆-haloalkyl, cycloalkyl, heterocyclyl, aryl, heteroaryl, halo, cyano, or —OR^{A}; R³ is hydrogen, C₁-C₆-alkyl, C₂-C₆-alkenyl, C₂-C₆-alkynyl, C₁-C₆-heteroalkyl, C₁-C₆-haloalkyl, cycloalkyl, heterocyclyl, aryl, heteroaryl, —C(O)R^{D}, or —OR^{A}; wherein each alkyl, alkenyl, alkynyl, heteroalkyl, haloalkyl, cycloalkyl, heterocyclyl, aryl, and heteroaryl is optionally substituted with one or more R⁵; each R⁴ is independently C₁-C₆-alkyl, C₂-C₆-alkenyl, C₂-C₆-alkynyl, C₁-C₆-heteroalkyl, C₁-C₆-haloalkyl, cycloalkyl, heterocyclyl, aryl, heteroaryl, halo, cyano, oxo, —OR^{A}, —NR^{B}R^{C}, —NR^{B}C(O)R^{D}, —NO₂, —C(O)NR^{B}R^{C}, —C(O)R^{D}, —C(O)OR^{D}, or —S(O)ₓR^{D}, wherein each alkyl, alkenyl, alkynyl, heteroalkyl, haloalkyl, cycloalkyl, heterocyclyl, aryl, and heteroaryl is optionally substituted with one or more R⁶; each R⁵ is C₁-C₆-alkyl, C₂-C₆-alkenyl, C₂-C₆-alkynyl, C₁-C₆-heteroalkyl, C₁-C₆-haloalkyl, cycloalkyl, heterocyclyl, aryl, heteroaryl, halo, cyano, oxo, —OR^{A}, —NR^{B}R^{C}, —NR^{B}C(O)R^{D}, —NO₂, —C(O)NR^{B}R^{C}, —C(O)R^{D}, —C(O)OR^{D}, or —S(O)ₓR^{D}; each R⁶ is independently C₁-C₆-alkyl, C₁-C₆-heteroalkyl, C₁-C₆-haloalkyl, cycloalkyl, heterocyclyl, aryl, heteroaryl, halo, cyano, oxo, or —OR^{A}; each R^{A} is independently hydrogen, C₁-C₆ alkyl, C₂-C₆ alkenyl, C₂-C₆ alkynyl, C₁-C₆ haloalkyl, C₁-C₆ heteroalkyl, cycloalkyl, heterocyclyl, aryl, heteroaryl, C₁-C₆ alkylene-aryl, C₁-C₆ alkylene-heteroaryl, —C(O)R^{D}, or —S(O)ₓR^{D}; each of R^{B} and R^{C} is independently hydrogen, C₁-C₆ alkyl, C₂-C₆ alkenyl, C₂-C₆ alkynyl, C₁-C₆ heteroalkyl, C₁-C₆ haloalkyl, cycloalkyl, heterocyclyl, aryl, heteroaryl, —C(O)R^{D}, or —S(O)ₓR^{D}; or R^{B} and R^{C} together with the atom to which they are attached form a 3-7-membered heterocyclyl ring optionally substituted with one or more R⁷; each R^{D} is independently hydrogen, C₁-C₆ alkyl, C₂-C₆ alkenyl, C₂-C₆ alkynyl, C₁-C₆ heteroalkyl, C₁-C₆ haloalkyl, cycloalkyl, heterocyclyl, aryl, heteroaryl, C₁-C₆ alkylene-aryl, or C₁-C₆ alkylene-heteroaryl; each R⁷ is C₁-C₆-alkyl, halo, cyano, oxo, or —OR^{A1}; each R^{A1} is hydrogen or C₁-C₆-alkyl; and x is 0, 1, or 2.

[0106] In some embodiments, the compound of Formula (I) is a compound of Formula (I-h):

[chemical structure]

or a pharmaceutically acceptable salt, solvate, hydrate, tautomer, or stereoisomer thereof, wherein A and B are each independently cycloalkyl, heterocyclyl, aryl, or heteroaryl, each of which is optionally substituted with one or more R¹; W is C(R³) or N; each R¹ is independently hydrogen, C₁-C₆-alkyl, C₂-C₆-alkenyl, C₂-C₆-alkynyl, C₁-C₆-heteroalkyl, C₁-C₆-haloalkyl, cycloalkyl, heterocyclyl, aryl, C₁-C₆ alkylene-aryl, C₂-C₆ alkenylene-aryl, C₁-C₆ heteroalkylene-aryl, heteroaryl, C₁-C₆ alkylene-heteroaryl, C₁-C₆ heteroalkylene-heteroaryl, halo, cyano, oxo, —OR^{A}, —NR^{B}R^{C}, —NR^{B}C(O)R^{D}, —NO₂, —C(O)NR^{B}R^{C}, —C(O)R^{D}, —C(O)OR^{D}, or —S(O)ₓR^{D}, wherein each alkyl, alkylene, alkenyl, alkynyl, heteroalkyl, haloalkyl, cycloalkyl, heterocyclyl, aryl, and heteroaryl is optionally substituted with one or more R⁴; or two R¹ groups, together with the atoms to which they are attached, form a 3-7-membered cycloalkyl, heterocyclyl, aryl, or heteroaryl, wherein each cycloalkyl, heterocyclyl, aryl, and heteroaryl is optionally substituted with one or more R⁴; R² is C₁-C₆-alkyl, C₂-C₆-alkenyl, C₂-C₆-alkynyl, C₁-C₆-heteroalkyl, C₁-C₆-haloalkyl, cycloalkyl, heterocyclyl, aryl, heteroaryl, halo, cyano, or —OR^{A}; R³ is hydrogen, C₁-C₆-alkyl, C₂-C₆-alkenyl, C₂-C₆-alkynyl, C₁-C₆-heteroalkyl, C₁-C₆-haloalkyl, cycloalkyl, heterocyclyl, aryl, heteroaryl, —C(O)R^{D}, or —OR^{A}; wherein each alkyl, alkenyl, alkynyl, heteroalkyl, haloalkyl, cycloalkyl, heterocyclyl, aryl, and heteroaryl is optionally substituted with one or more R⁵; each R⁴ is independently C₁-C₆-alkyl, C₂-C₆-alkenyl, C₂-C₆-alkynyl, C₁-C₆-heteroalkyl, C₁-C₆-haloalkyl, cycloalkyl, heterocyclyl, aryl, heteroaryl, halo, cyano, oxo, —OR^{A}, —NR^{B}R^{C}, —NR^{B}C(O)R^{D}, —NO₂, —C(O)NR^{B}R^{C}, —C(O)R^{D}, —C(O)OR^{D}, or —S(O)ₓR^{D}, wherein each alkyl, alkenyl, alkynyl, heteroalkyl, haloalkyl, cycloalkyl, heterocyclyl, aryl, and heteroaryl is optionally substituted with one or more R⁶; each R⁵ is C₁-C₆-alkyl, C₂-C₆-alkenyl, C₂-C₆-alkynyl, C₁-C₆-heteroalkyl, C₁-C₆-haloalkyl, cycloalkyl, heterocyclyl, aryl, heteroaryl, halo, cyano, oxo, —OR^{A}, —NR^{B}R^{C}, —NR^{B}C(O)R^{D}, —NO₂, —C(O)NR^{B}R^{C}, —C(O)R^{D}, —C(O)OR^{D}, or —S(O)ₓR^{D}; each R⁶ is independently C₁-C₆-alkyl, C₁-C₆-heteroalkyl, C₁-C₆-haloalkyl, cycloalkyl, heterocyclyl, aryl, heteroaryl, halo, cyano, oxo, or —OR^{A}; each R^{A} is independently hydrogen, C₁-C₆ alkyl, C₂-C₆ alkenyl, C₂-C₆ alkynyl, C₁-C₆ haloalkyl, C₁-C₆ heteroalkyl, cycloalkyl, heterocyclyl, aryl, heteroaryl, C₁-C₆ alkylene-aryl, C₁-C₆ alkylene-heteroaryl, —C(O)R^{D}, or —S(O)ₓR^{D}; each of R^{B} and R^{C} is independently hydrogen, C₁-C₆ alkyl, C₂-C₆ alkenyl, C₂-C₆ alkynyl, C₁-C₆ heteroalkyl, C₁-C₆ haloalkyl, cycloalkyl, heterocyclyl, aryl, heteroaryl, —C(O)R^{D}, or —S(O)ₓR^{D}; or R^{B} and R^{C} together with the atom to which they are attached form a 3-7-membered heterocyclyl ring optionally substituted with one or more R⁷; each R^{D} is independently hydrogen, C₁-C₆ alkyl, C₂-C₆ alkenyl, C₂-C₆ alkynyl, C₁-C₆ heteroalkyl, C₁-C₆ haloalkyl, cycloalkyl, heterocyclyl, aryl, heteroaryl, C₁-C₆ alkylene-aryl, or C₁-C₆ alkylene-heteroaryl; each R⁷ is C₁-C₆-alkyl, halo, cyano, oxo, or —OR^{A1}; each R^{A1} is hydrogen or C₁-C₆-alkyl; and x is 0, 1, or 2.

[0107] In some embodiments, the compound of Formula (I) is a compound of Formula (I-i):

[chemical structure]

or a pharmaceutically acceptable salt, solvate, hydrate, tautomer, or stereoisomer thereof, wherein A, B, W, X, Z¹, Z², and R² are as defined for Formula (I); each R^{8a} and R^{8b} is independently C₁-C₆-alkyl, halo, cyano, oxo, or —OR^{A1}; and y is 0, 1, 2, 3, or 4.

[0108] In some embodiments, the compound of Formula (I) is a compound of Formula (I-j):

[chemical structure]

or a pharmaceutically acceptable salt, solvate, hydrate, tautomer, or stereoisomer thereof, wherein each R^{1a}, R^{1b}, R^{1c}, R^{8a} and R^{8b} is independently C₁-C₆-alkyl, halo, cyano, oxo, or —OR^{A1}; X¹ is C(R¹) or N; X² is C(R¹)₂ or N(R¹); y is 0, 1, 2, 3, or 4; and W, X, Z¹, Z², R¹ and R² are as defined for Formula (I).

[0109] In some embodiments, the compound of Formula (I) is a compound of Formula (I-k):

[chemical structure]

or a pharmaceutically acceptable salt, solvate, hydrate, tautomer, or stereoisomer thereof, wherein each of X¹ and X³ is independently C(R³) or N; X² is C or N; and wherein A, Z¹, R¹, R², and R³ are as defined for Formula (I).

[0110] In some embodiments, the compound of Formula (I) is a compound of Formula (I-l):

[chemical structure]

or a pharmaceutically acceptable salt, solvate, hydrate, tautomer, or stereoisomer thereof, wherein each of R^{1a}, R^{1b}, and R^{1c} is independently hydrogen, C₁-C₆-alkyl, halo, or —OR^{A}; and wherein A, R^{A}, Z¹, R¹, R², and R³ are as defined for Formula (I).

[0111] In some embodiments, the compound of Formula (I) is a compound of Formula (I-m):

[chemical structure]

or a pharmaceutically acceptable salt, solvate, hydrate, tautomer, or stereoisomer thereof, wherein each of X¹ and X³ is independently C(R¹) or N; X² is C or N; and wherein A, Z¹, R¹ and R² are as defined for Formula (I).

[0112] In some embodiments, the compound of Formula (I) is a compound of Formula (I-n):

[chemical structure]

or a pharmaceutically acceptable salt, solvate, hydrate, tautomer, or stereoisomer thereof, wherein each of R^{1a} and R^{1b} is independently hydrogen, C₁-C₆-alkyl, halo, or —OR^{A}; and wherein A, R^{A}, Z¹, R¹, R², and R³ are as defined for Formula (I).

[0113] In some embodiments, the compound of Formula (I) is a compound of Formula (I-0):

[chemical structure]

or a pharmaceutically acceptable salt, solvate, hydrate, tautomer, or stereoisomer thereof, wherein each of X¹ and X² is independently C(R¹) or N; and wherein A, Z¹, R¹ and R² are as defined for Formula (I).

[0114] In some embodiments, the compound of Formula (I) is a compound of Formula (I-p):

[chemical structure]

or a pharmaceutically acceptable salt, solvate, hydrate, tautomer, or stereoisomer thereof, wherein each of R^{1a}, R^{1b}, and R^{1c} is independently hydrogen, C₁-C₆-alkyl, halo, or —OR^{A}; and wherein A, R^{A}, Z¹, R¹ and R² are as defined for Formula (I).

[0115] In some embodiments, the compound of Formula (I) is a compound of Formula (I-q):

[chemical structure]

or a pharmaceutically acceptable salt, solvate, hydrate, tautomer, or stereoisomer thereof, wherein X¹ is C(R¹); X² is C(R¹)₂ or N(R¹); and wherein B, Z¹, R¹, R² and R³ are as defined for Formula (I).

[0116] In some embodiments, the compound of Formula (I) is a compound of Formula (I-r):

[chemical structure]

or a pharmaceutically acceptable salt, solvate, hydrate, tautomer, or stereoisomer thereof, wherein each of R^{1c}, R^{1d} and R^{1e} is independently hydrogen, alkyl, halo, or heteroalkyl; or R^{1d} and R^{1e} together with the atoms to which they are attached, form a three or four membered cycloalkyl group; and wherein each of B, Z¹, Z², R², and R³ are as defined as for Formula (I).

[0117] In some embodiments, the compound of Formula (I) is a compound of Formula (I-s):

[chemical structure]

or a pharmaceutically acceptable salt, solvate, hydrate, tautomer, or stereoisomer thereof, wherein X¹ is C(R¹); X² is C(R¹)₂ or N(R¹); each of R^{1a}, R^{1b}, and R^{1c} is independently hydrogen, C₁-C₆-alkyl, halo, or —OR^{A} and wherein R^{A}, Z¹, R¹, R², and R³ are as defined for Formula (I).

[0118] In some embodiments, the compound of Formula (I) is a compound of Formula (I-t):

[chemical structure]

or a pharmaceutically acceptable salt, solvate, hydrate, tautomer, or stereoisomer thereof, wherein X¹ is C(R¹); X² is C(R¹)₂ or N(R¹); each of R^{1a}, R^{1b}, and R^{1c} is independently hydrogen, C₁-C₆-alkyl, halo, or —OR^{A} and wherein R^{A}, Z¹, R¹, and R² are as defined for Formula (I).

[0119] In some embodiments, the compound of Formula (I) is a compound of Formula (I-u):

[chemical structure]

or a pharmaceutically acceptable salt, solvate, hydrate, tautomer, or stereoisomer thereof, wherein X¹ is C(R¹); X² is C(R¹)₂ or N(R¹); each of R^{1a} and R^{1b} is independently hydrogen, C₁-C₆-alkyl, halo, or —OR^{A} and wherein R^{A}, Z¹, R¹, and R² are as defined for Formula (I).

[0120] In some embodiments, the compound of Formula (I) is a compound of Formula (I-v):

[chemical structure]

or a pharmaceutically acceptable salt, solvate, hydrate, tautomer, or stereoisomer thereof, wherein each of R^{1a}, R^{1b}, R^{1c}, R^{1d}, R^{1e}, and R^{1f} is independently hydrogen, C₁-C₆-alkyl, halo, or R^{A}; and wherein R^{A}, Z¹, R¹, and R² are as defined in for Formula (I).

[0121] In some embodiments of any and all of Formulas (I-a), (I-b), (I-c), (I-d), (I-e), (I-f), (I-g), (I-h), (I-i), (I-j), (I-k), (I-l), (I-m), (I-n), (I-o), (I-p), (I-q), (I-r), (I-s), (I-t), (I-u), and (I-v) or a pharmaceutically acceptable salt thereof, one of A and B is selected from

[chemical structure]

wherein R¹ is as described herein. In some embodiments, one of A and B is independently selected from

[chemical structure]

wherein R is as described herein. In some embodiments, one of A and B is independently selected from

[chemical structure]

[chemical structure]

In some embodiments, one of A and B is independently selected from

[chemical structure]

In some embodiments, one of A and B is independently selected from

[chemical structure]

and

[chemical structure]

wherein R¹ is as described herein. In some embodiments, one of A and B is independently selected from

[chemical structure]

wherein R¹ is as described herein. In some embodiments, one of A and B is independently selected from

[chemical structure]

[chemical structure]

[chemical structure]

[0122] In some embodiments, A is selected from

[chemical structure]

wherein R¹ is as defined herein.

[0123] In some embodiments of Formulas (I-a), (I-b), (I-c), (I-d), (I-e), (I-f), (I-g), (I-h), (I-i), (I-j), (I-k), (I-l), (I-m), (I-n), (I-o), (I-p), (I-q), (I-r), (I-s), (I-t), (I-u), or (I-v), A is selected from

[chemical structure]

[chemical structure]

In some embodiments, A is

[chemical structure]

In some embodiments, A is

[chemical structure]

[0124] In some embodiments of Formulas (I-a), (I-b), (I-c), (I-d), (I-e), (I-f), (I-g), (I-h), (I-i), (I-j), (I-k), (I-l), (I-m), (I-n), (I-o), (I-p), (I-q), (I-r), (I-s), (I-t), (I-u), or (I-v), B is selected from

[chemical structure]

wherein R¹ is as defined herein.

[0125] In some embodiments, B is selected from

[chemical structure]

[chemical structure]

wherein R¹ is as defined herein. In some embodiments, B is selected from

[chemical structure]

In some embodiments, B is

[chemical structure]

wherein R¹ is as defined herein. In some embodiments, B is selected from

[chemical structure]

In some embodiments, B is

[chemical structure]

In some embodiments, B is

[chemical structure]

In some embodiments, B is

[chemical structure]

In some embodiments, B is

[chemical structure]

In some embodiments, B is

[chemical structure]

In some embodiments, B is

[chemical structure]

In some embodiments, B is

[chemical structure]

In some embodiments, B is

[chemical structure]

In some embodiments, B is

[chemical structure]

[0126] In some embodiments, L is absent. In some embodiments, L is C₁-C₆-alkylene (e.g., C₁-alkylene, C₂-alkylene, C₃-alkylene, C₄-alkylene, C₅-alkylene, or C₆-alkylene). In some embodiments, L is unsubstituted C₁-C₆ alkylene. In some embodiments, L is substituted C₁-C₆-alkylene, e.g., C₁-C₆ alkylene substituted with one or more R⁴. In some embodiments, L is C₁-alkylene substituted with one R⁴. In some embodiments, L is —CH₂— (or methylene). In some embodiments, L is —C(O)— (or carbonyl).

[0127] In some embodiments, L is absent, C₁-C₆-alkylene, or C₁-C₆-heteroalkylene, wherein each alkylene and heteroalkylene is optionally substituted with one or more R⁴.

[0128] In some embodiments of Formulas (I-a), (I-b), (I-c), (I-d), (I-e), (I-f), (I-g), (I-h), (I-i), (I-j), (I-k), (I-l), (I-m), (I-n), (I-o), (I-p), (I-q), (I-r), (I-s), (I-t), (I-u), or (I-v), R² is selected from hydrogen, halo (e.g., fluoro, chloro), C₁-C₆-alkyl (e.g., CH₃), or —OR^{A1} (e.g., —OCH₃). In some embodiments, R² is hydrogen. In some embodiments, R² is halo (e.g., fluoro, chloro). In some embodiments, R² is C₁-C₆-alkyl (e.g., CH₃). In some embodiments, R² is —OR^{A1} (e.g., —OCH₃).

[0129] In some embodiments, the compound of Formula (I) is selected from a compound in Table 1, or a pharmaceutically acceptable salt, solvate, hydrate, tautomer, or stereoisomer thereof.

TABLE 1
Exemplary compounds.

| Compound No. | Structure |
|---|---|
| 100 | [chemical structure] |
| 102 | [chemical structure] |
| 103 | [chemical structure] |
| 104 | [chemical structure] |
| 105 | [chemical structure] |
| 107 | [chemical structure] |
| 108 | [chemical structure] |
| 109 | [chemical structure] |
| 110 | [chemical structure] |
| 111 | [chemical structure] |
| 112 | [chemical structure] |
| 113 | [chemical structure] |
| 114 | [chemical structure] |
| 115 | [chemical structure] |
| 116 | [chemical structure] |
| 117 | [chemical structure] |
| 118 | [chemical structure] |
| 119 | [chemical structure] |
| 120 | [chemical structure] |
| 121 | [chemical structure] |
| 122 | [chemical structure] |
| 123 | [chemical structure] |
| 124 | [chemical structure] |
| 125 | [chemical structure] |
| 126 | [chemical structure] |
| 127 | [chemical structure] |
| 128 | [chemical structure] |
| 129 | [chemical structure] |
| 130 | [chemical structure] |
| 131 | [chemical structure] |
| 132 | [chemical structure] |
| 133 | [chemical structure] |
| 134 | [chemical structure] |
| 135 | [chemical structure] |
| 136 | [chemical structure] |
| 137 | [chemical structure] |
| 138 | [chemical structure] |
| 139 | [chemical structure] |
| 140 | [chemical structure] |
| 141 | [chemical structure] |
| 142 | [chemical structure] |
| 143 | [chemical structure] |
| 144 | [chemical structure] |
| 145 | [chemical structure] |
| 146 | [chemical structure] |
| 147 | [chemical structure] |
| 148 | [chemical structure] |
| 149 | [chemical structure] |
| 150 | [chemical structure] |
| 151 | [chemical structure] |
| 152 | [chemical structure] |
| 153 | [chemical structure] |
| 154 | [chemical structure] |
| 155 | [chemical structure] |
| 156 | [chemical structure] |
| 157 | [chemical structure] |
| 158 | [chemical structure] |
| 159 | [chemical structure] |
| 160 | [chemical structure] |
| 161 | [chemical structure] |
| 162 | [chemical structure] |
| 163 | [chemical structure] |
| 165 | [chemical structure] |
| 166 | [chemical structure] |
| 167 | [chemical structure] |
| 168 | [chemical structure] |
| 169 | [chemical structure] |
| 170 | [chemical structure] |
| 171 | [chemical structure] |
| 172 | [chemical structure] |
| 173 | [chemical structure] |
| 174 | [chemical structure] |
| 175 | [chemical structure] |
| 176 | [chemical structure] |
| 177 | [chemical structure] |
| 178 | [chemical structure] |
| 179 | [chemical structure] |
| 180 | [chemical structure] |
| 181 | [chemical structure] |
| 182 | [chemical structure] |
| 183 | [chemical structure] |
| 184 | [chemical structure] |
| 185 | [chemical structure] |
| 186 | [chemical structure] |
| 187 | [chemical structure] |
| 188 | [chemical structure] |
| 189 | [chemical structure] |
| 190 | [chemical structure] |
| 191 | [chemical structure] |
| 192 | [chemical structure] |
| 193 | [chemical structure] |
| 194 | [chemical structure] |
| 195 | [chemical structure] |
| 196 | [chemical structure] |
| 197 | [chemical structure] |
| 198 | [chemical structure] |
| 199 | [chemical structure] |
| 200 | [chemical structure] |
| 201 | [chemical structure] |
| 202 | [chemical structure] |
| 203 | [chemical structure] |
| 204 | [chemical structure] |
| 205 | [chemical structure] |
| 206 | [chemical structure] |
| 207 | [chemical structure] |
| 208 | [chemical structure] |
| 209 | [chemical structure] |
| 210 | [chemical structure] |
| 211 | [chemical structure] |
| 212 | [chemical structure] |
| 213 | [chemical structure] |
| 214 | [chemical structure] |

### Pharmaceutical Compositions, Kits, and Administration

[0130] The present invention provides pharmaceutical compositions comprising a compound of Formula (I), e.g., a compound of Formula (I) or a pharmaceutically acceptable salt, solvate, hydrate, tautomer, or stereoisomer, as described herein, and optionally a pharmaceutically acceptable excipient. In certain embodiments, the pharmaceutical composition described herein comprises a compound of Formula (I) or a pharmaceutically acceptable salt thereof, and optionally a pharmaceutically acceptable excipient. In certain embodiments, the compound of Formula (I) or a pharmaceutically acceptable salt, solvate, hydrate, tautomer, or stereoisomer thereof, is provided in an effective amount in the pharmaceutical composition. In certain embodiments, the effective amount is a therapeutically effective amount. In certain embodiments, the effective amount is a prophylactically effective amount.

[0131] Pharmaceutical compositions described herein can be prepared by any method known in the art of pharmacology. In general, such preparatory methods include the steps of bringing the compound of Formula (I) (the “active ingredient”) into association with a carrier and/or one or more other accessory ingredients, and then, if necessary and/or desirable, shaping and/or packaging the product into a desired single- or multi-dose unit.

[0132] Pharmaceutical compositions can be prepared, packaged, and/or sold in bulk, as a single unit dose, and/or as a plurality of single unit doses. As used herein, a “unit dose” is a discrete amount of the pharmaceutical composition comprising a predetermined amount of the active ingredient. The amount of the active ingredient is generally equal to the dosage of the active ingredient which would be administered to a subject and/or a convenient fraction of such a dosage such as, for example, one-half or one-third of such a dosage.

[0133] Relative amounts of the active ingredient, the pharmaceutically acceptable excipient, and/or any additional ingredients in a pharmaceutical composition of the invention will vary, depending upon the identity, size, and/or condition of the subject treated and further depending upon the route by which the composition is to be administered. By way of example, the composition may comprise between 0.1% and 100% (w/w) active ingredient.

[0134] The term “pharmaceutically acceptable excipient” refers to a non-toxic carrier, adjuvant, diluent, or vehicle that does not destroy the pharmacological activity of the compound with which it is formulated. Pharmaceutically acceptable excipients useful in the manufacture of the pharmaceutical compositions of the invention are any of those that are well known in the art of pharmaceutical formulation and include inert diluents, dispersing and/or granulating agents, surface active agents and/or emulsifiers, disintegrating agents, binding agents, preservatives, buffering agents, lubricating agents, and/or oils. Pharmaceutically acceptable excipients useful in the manufacture of the pharmaceutical compositions of the invention include, but are not limited to, ion exchangers, alumina, aluminum stearate, lecithin, serum proteins, such as human serum albumin, buffer substances such as phosphates, glycine, sorbic acid, potassium sorbate, partial glyceride mixtures of saturated vegetable fatty acids, water, salts or electrolytes, such as protamine sulfate, disodium hydrogen phosphate, potassium hydrogen phosphate, sodium chloride, zinc salts, colloidal silica, magnesium trisilicate, polyvinyl pyrrolidone, cellulose-based substances, polyethylene glycol, sodium carboxymethylcellulose, polyacrylates, waxes, polyethylene-polyoxypropylene-block polymers, polyethylene glycol and wool fat.

[0135] Compositions of the present invention may be administered orally, parenterally (including subcutaneous, intramuscular, intravenous and intradermal), by inhalation spray, topically, rectally, nasally, buccally, vaginally or via an implanted reservoir. In some embodiments, provided compounds or compositions are administrable intravenously and/or orally.

[0136] The term “parenteral” as used herein includes subcutaneous, intravenous, intramuscular, intraocular, intravitreal, intra-articular, intra-synovial, intrasternal, intrathecal, intrahepatic, intraperitoneal intralesional and intracranial injection or infusion techniques. Preferably, the compositions are administered orally, subcutaneously, intraperitoneally, or intravenously. Sterile injectable forms of the compositions of this invention may be aqueous or oleaginous suspension. These suspensions may be formulated according to techniques known in the art using suitable dispersing or wetting agents and suspending agents. The sterile injectable preparation may also be a sterile injectable solution or suspension in a non-toxic parenterally acceptable diluent or solvent, for example as a solution in 1,3-butanediol. Among the acceptable vehicles and solvents that may be employed are water, Ringer's solution and isotonic sodium chloride solution. In addition, sterile, fixed oils are conventionally employed as a solvent or suspending medium.

[0137] Pharmaceutically acceptable compositions of this invention may be orally administered in any orally acceptable dosage form including, but not limited to, capsules, tablets, aqueous suspensions or solutions. In the case of tablets for oral use, carriers commonly used include lactose and corn starch. Lubricating agents, such as magnesium stearate, are also typically added. For oral administration in a capsule form, useful diluents include lactose and dried cornstarch. When aqueous suspensions are required for oral use, the active ingredient is combined with emulsifying and suspending agents. If desired, certain sweetening, flavoring or coloring agents may also be added. In some embodiments, a provided oral formulation is formulated for immediate release or sustained/delayed release. In some embodiments, the composition is suitable for buccal or sublingual administration, including tablets, lozenges and pastilles. A provided compound can also be in micro-encapsulated form.

[0138] Alternatively, pharmaceutically acceptable compositions of this invention may be administered in the form of suppositories for rectal administration. Pharmaceutically acceptable compositions of this invention may also be administered topically, especially when the target of treatment includes areas or organs readily accessible by topical application, including diseases of the eye, the skin, or the lower intestinal tract. Suitable topical formulations are readily prepared for each of these areas or organs.

[0139] For ophthalmic use, provided pharmaceutically acceptable compositions may be formulated as micronized suspensions or in an ointment such as petrolatum.

[0140] In order to prolong the effect of a drug, it is often desirable to slow the absorption of the drug from subcutaneous or intramuscular injection. This can be accomplished by the use of a liquid suspension of crystalline or amorphous material with poor water solubility. The rate of absorption of the drug then depends upon its rate of dissolution which, in turn, may depend upon crystal size and crystalline form. Alternatively, delayed absorption of a parenterally administered drug form is accomplished by dissolving or suspending the drug in an oil vehicle.

[0141] Although the descriptions of pharmaceutical compositions provided herein are principally directed to pharmaceutical compositions which are suitable for administration to humans, it will be understood by the skilled artisan that such compositions are generally suitable for administration to animals of all sorts. Modification of pharmaceutical compositions suitable for administration to humans in order to render the compositions suitable for administration to various animals is well understood, and the ordinarily skilled veterinary pharmacologist can design and/or perform such modification with ordinary experimentation.

[0142] Compounds provided herein are typically formulated in dosage unit form, e.g., single unit dosage form, for ease of administration and uniformity of dosage. It will be understood, however, that the total daily usage of the compositions of the present invention will be decided by the attending physician within the scope of sound medical judgment. The specific therapeutically effective dose level for any particular subject or organism will depend upon a variety of factors including the disease being treated and the severity of the disorder; the activity of the specific active ingredient employed; the specific composition employed; the age, body weight, general health, sex and diet of the subject; the time of administration, route of administration, and rate of excretion of the specific active ingredient employed; the duration of the treatment; drugs used in combination or coincidental with the specific active ingredient employed; and like factors well known in the medical arts.

[0143] The exact amount of a compound required to achieve an effective amount will vary from subject to subject, depending, for example, on species, age, and general condition of a subject, severity of the side effects or disorder, identity of the particular compound(s), mode of administration, and the like. The desired dosage can be delivered three times a day, two times a day, once a day, every other day, every third day, every week, every two weeks, every three weeks, or every four weeks. In certain embodiments, the desired dosage can be delivered using multiple administrations (e.g., two, three, four, five, six, seven, eight, nine, ten, eleven, twelve, thirteen, fourteen, or more administrations).

[0144] In certain embodiments, an effective amount of a compound for administration one or more times a day to a 70 kg adult human may comprise about 0.0001 mg to about 3000 mg, about 0.0001 mg to about 2000 mg, about 0.0001 mg to about 1000 mg, about 0.001 mg to about 1000 mg, about 0.01 mg to about 1000 mg, about 0.1 mg to about 1000 mg, about 1 mg to about 1000 mg, about 1 mg to about 100 mg, about 10 mg to about 1000 mg, or about 100 mg to about 1000 mg, of a compound per unit dosage form.

[0145] In certain embodiments, the compounds of Formula (I) may be at dosage levels sufficient to deliver from about 0.001 mg/kg to about 100 mg/kg, from about 0.01 mg/kg to about 50 mg/kg, preferably from about 0.1 mg/kg to about 40 mg/kg, preferably from about 0.5 mg/kg to about 30 mg/kg, from about 0.01 mg/kg to about 10 mg/kg, from about 0.1 mg/kg to about 10 mg/kg, and more preferably from about 1 mg/kg to about 25 mg/kg, of subject body weight per day, one or more times a day, to obtain the desired therapeutic effect.

[0146] It will be appreciated that dose ranges as described herein provide guidance for the administration of provided pharmaceutical compositions to an adult. The amount to be administered to, for example, a child or an adolescent can be determined by a medical practitioner or person skilled in the art and can be lower or the same as that administered to an adult.

[0147] It will be also appreciated that a compound or composition, as described herein, can be administered in combination with one or more additional pharmaceutical agents. The compounds or compositions can be administered in combination with additional pharmaceutical agents that improve their bioavailability, reduce and/or modify their metabolism, inhibit their excretion, and/or modify their distribution within the body. It will also be appreciated that the therapy employed may achieve a desired effect for the same disorder, and/or it may achieve different effects.

[0148] The compound or composition can be administered concurrently with, prior to, or subsequent to, one or more additional pharmaceutical agents, which may be useful as, e.g., combination therapies. Pharmaceutical agents include therapeutically active agents. Pharmaceutical agents also include prophylactically active agents. Each additional pharmaceutical agent may be administered at a dose and/or on a time schedule determined for that pharmaceutical agent. The additional pharmaceutical agents may also be administered together with each other and/or with the compound or composition described herein in a single dose or administered separately in different doses. The particular combination to employ in a regimen will take into account compatibility of the inventive compound with the additional pharmaceutical agents and/or the desired therapeutic and/or prophylactic effect to be achieved. In general, it is expected that the additional pharmaceutical agents utilized in combination be utilized at levels that do not exceed the levels at which they are utilized individually. In some embodiments, the levels utilized in combination will be lower than those utilized individually.

[0149] Exemplary additional pharmaceutical agents include, but are not limited to, anti-proliferative agents, anti-cancer agents, anti-diabetic agents, anti-inflammatory agents, immunosuppressant agents, and a pain-relieving agent. Pharmaceutical agents include small organic molecules such as drug compounds (e.g., compounds approved by the U.S. Food and Drug Administration as provided in the Code of Federal Regulations (CFR)), peptides, proteins, carbohydrates, monosaccharides, oligosaccharides, polysaccharides, nucleoproteins, mucoproteins, lipoproteins, synthetic polypeptides or proteins, small molecules linked to proteins, glycoproteins, steroids, nucleic acids, DNAs, RNAs, nucleotides, nucleosides, oligonucleotides, antisense oligonucleotides, lipids, hormones, vitamins, and cells.

[0150] Also encompassed by the invention are kits (e.g., pharmaceutical packs). The inventive kits may be useful for preventing and/or treating a proliferative disease or a non-proliferative disease, e.g., as described herein. The kits provided may comprise an inventive pharmaceutical composition or compound and a container (e.g., a vial, ampule, bottle, syringe, and/or dispenser package, or other suitable container). In some embodiments, provided kits may optionally further include a second container comprising a pharmaceutical excipient for dilution or suspension of an inventive pharmaceutical composition or compound. In some embodiments, the inventive pharmaceutical composition or compound provided in the container and the second container are combined to form one-unit dosage form.

[0151] Thus, in one aspect, provided are kits including a first container comprising a compound described herein, or a pharmaceutically acceptable salt, solvate, hydrate, tautomer, or stereoisomer thereof, or a pharmaceutical composition thereof. In certain embodiments, the kit of the disclosure includes a first container comprising a compound described herein, or a pharmaceutically acceptable salt thereof, or a pharmaceutical composition thereof. In certain embodiments, the kits are useful in preventing and/or treating a disease, disorder, or condition described herein in a subject (e.g., a proliferative disease or a non-proliferative disease). In certain embodiments, the kits further include instructions for administering the compound, or a pharmaceutically acceptable salt, solvate, hydrate, tautomer, or stereoisomer thereof, or a pharmaceutical composition thereof, to a subject to prevent and/or treat a proliferative disease or a non-proliferative disease.

### Methods of Use

[0152] Described herein are compounds useful for modulating splicing. In some embodiments, a compound of Formula (I) may be used to alter the amount, structure, or composition of a nucleic acid (e.g., a precursor RNA, e.g., a pre-mRNA, or the resulting mRNA) by increasing or decreasing splicing at a splice site. In some embodiments, increasing or decreasing splicing results in modulating the level or structure of a gene product (e.g., an RNA or protein) produced. In some embodiments, a compound of Formula (I) may modulate a component of the splicing machinery, e.g., by modulating the interaction with a component of the splicing machinery with another entity (e.g., nucleic acid, protein, or a combination thereof). The splicing machinery as referred to herein comprises one or more spliceosome components. Spliceosome components may comprise, for example, one or more of major spliceosome members (U1, U2, U4, U5, U6 snRNPs), or minor spliceosome members (U11, U12, U4atac, U6atac snRNPs) and their accessory splicing factors.

[0153] In another aspect, the present disclosure features a method of modifying of a target (e.g., a precursor RNA, e.g., a pre-mRNA) through inclusion of a splice site in the target, wherein the method comprises providing a compound of Formula (I). In some embodiments, inclusion of a splice site in a target (e.g., a precursor RNA, e.g., a pre-mRNA, or the resulting mRNA) results in addition or deletion of one or more nucleic acids to the target (e.g., a new exon, e.g. a skipped exon). Addition or deletion of one or more nucleic acids to the target may result in an increase in the levels of a gene product (e.g., RNA, e.g., mRNA, or protein).

[0154] In another aspect, the present disclosure features a method of modifying a target (e.g., a precursor RNA, e.g., a pre-mRNA, or the resulting mRNA) through exclusion of a splice site in the target, wherein the method comprises providing a compound of Formula (I). In some embodiments, exclusion of a splice site in a target (e.g., a precursor RNA, e.g., a pre-mRNA) results in deletion or addition of one or more nucleic acids from the target (e.g., a skipped exon, e.g. a new exon). Deletion or addition of one or more nucleic acids from the target may result in a decrease in the levels of a gene product (e.g., RNA, e.g., mRNA, or protein). In other embodiments, the methods of modifying a target (e.g., a precursor RNA, e.g., a pre-mRNA, or the resulting mRNA) comprise suppression of splicing at a splice site or enhancement of splicing at a splice site (e.g., by more than about 0.5%, e.g., 1%, 5%, 10%, 15%, 20%, 25%, 30%, 35%, 40%, 45%, 50%, 55%, 60%, 65%, 70%, 75%, 80%, 85%, 90%, 95%, 99%, or more), e.g., as compared to a reference (e.g., the absence of a compound of Formula (I), or in a healthy or diseased cell or tissue).

[0155] The methods described herein can be used to modulate splicing, e.g., of a nucleic acid comprising a particular sequence (e.g., a target sequence). Exemplary genes encoding a target sequence (e.g., a target sequence comprising DNA or RNA, e.g., pre-mRNA) include, inter alia, ABCA4, ABCA9, ABCB1, ABCB5, ABCC9, ABCD1, ACADL, ACADM, ACADSB, ACSS2, ACTB, ACTG2, ADA, ADAL, ADAM10, ADAM15, ADAM22, ADAM32, ADAMTS12, ADAMTS13, ADAMTS20, ADAMTS6, ADAMTS9, ADAR, ADCY3, ADCY10, ADCY8, ADNP, ADRBK2, AFP, AGL, AGT, AHCTF1, AHR, AKAP10, AKAP3, AKNVA, ALAS1, ALS2CL, ALB, ALDH3A2, ALG6, AMBRA1, ANK3, ANTXR2, ANXA10, ANXA11, ANGPTL3, AP2A2, AP4E1, APC, APOA1, APOB, APOC3, APOH, AR, ARID2, ARID3A, ARID3B, ARFGEF1, ARFGEF2, ARHGAP1, ARHGAP8, ARHGAP18, ARHGAP26, ARHGEF18, ARHGEF2, ARPC3, ARS2, ASH1L, ASHIL-IT1, ASNSD1, ASPM, ATAD5, ATF1, ATG4A, ATG16L2, ATM ATN1, ATP11C, ATP6V1G3, ATP13A5, ATP7A, ATP7B, ATR, ATXN2, ATXN3, ATXN7, ATXN10, AXIN1, B2M B4GALNT3, BBS4, BCL2, BCL2L1, BCL2-like 11 (BIM), BCL11B, BBOX1, BCS1L, BEMAN, BHLHE40, BMPR2, BMP2K, BPTF, BRAF, BRCA1, BRCA2, BRCC3, BRSK1, BRSK2, BTAF1, BTK, C2orf55, C4orf29, C6orf118, C9orf43, C9orf72, C10orf137, C11orf30, C11orf65, C11orf70, C11orf87, C12orf51, C13orf1, C13orf15, C14orf11, C14orf118, C15orf29, C15orf42, C15orf60, C16orf33, C16orf38, C16orf48, C18orf8, C19orf42, C1orf107, C1orf114, C1orf130, C1orf149, C1orf27, C1orf71, C1orf94, C1R, C20orf74, C21orf70, C3orf23, C4orf18, C5orf34, C8B, C8orf33, C9orf114, C9orf86, C9orf98, C3, CA11, CAB39, CACHD1, CACNA1A, CACNA1B, CACNA1C, CACNA2D1, CACNA1G, CACNA1H, CALCA, CALCOCO2, CAMK1D, CAMKK1, CAPN3, CAPN9, CAPSL, CARD11, CARKD, CASZ1, CAT, CBLB, CBX1, CBX3, CCDC102B, CCDC11, CCDC15, CCDC18, CCDC5, CCDC81, CCDC131, CCDC146, CD4, CD274, CD1B, CDC14A, CDC16, CDC2L5, CDC42BPB, CDCA8, CDH10, CDH11, CDH24, CDH8, CDH9, CDK5RAP2, CDK6, CDK8, CDK11B, CD33, CD46, CDH1, CDH23, CDK6, CDKI1B, CDK13, CEBPZ, CEL, CELSR3, CENPA, CENPI, CENPT, CENTB2, CENTG2, CEP110, CEP170, CEP192, CETP, CFB, CFTR, CFH, CGN, CGNL1, CHAFIA, CHD9, CHIC2, CHL1, CHN1, CHM CLEC16A, CLIC2, CLCN1, CLINT1, CLK1, CLPB, CLPTM1, CMIP, CMYA5, CNGA3, CNOT1, CNOT7, CNTN6, COG3, COL1A1, COL11A2, COL12A1, COL14A1, COL15A1, COL17AM, COL19A1, COL1A1, COL1A2, COL2A, COL3A1, COL4A1, COL4A2, COL4A5, COL4A6, COL5A2, COL6A1, COL7A, COL9A, COL9A2, COL22A1, COL24A1, COL25A1, COL29A1, COLQ, COMTD1, COPA, COPB2, COPS7B, COPZ2, CPSF2, CPXM2, CR1, CRBN, CRYZ, CREBBP, CRKRS, CSE1L, CSTB, CSTF3, CT45-6, CTNNB1, CUBN, CUL4B, CUL5, CXorf41, CXXC1, CYBB, CYFIP2, CYP3A4, CYP3A43, CYP3A5, CYP4F2, CYP4F3, CYP17, CYP19, CYP24A1, CYP27A1, DAB1, DAZ2, DCBLD1, DCC, DCTN3, DCUN1D4, DDA1, DDEF1, DDX1, DDX24, DDX4, DENND2D, DEPDC2, DES, DGAT2, DHFR, DHRS7, DHRS9, DHX8, DIP2A, DMD, DMTF, DNAH3, DNAH8, DNAI1, DNAJA4, DNAJC3, DNAJC7, DNMT1, DNTTIP2, DOCK4, DOCK5, DOCK1O, DOCK11, DOTIL, DPP3, DPP4, DPY19L2P2, DR1, DSCC1, DVL3, DUX4, DYNC1H1, DYSF, E2F1, E2F3, E2F8, E4F1, EBF1, EBF3, ECM2, EDEM3, EFCAB3, EFCAB4B, EFNA4, EFTUD2, EGFR, EIF3A, ELA1, ELA2A, ELF2, ELF3, ELF4, EMCN, EMD, EML5, ENO3, ENPP3, EP300, EPAS1, EPB41L5, EPHA3, EPHA4, EPHB1, EPHB2, EPHB3, EPS15, ERBB4, ERCC1, ERCC8, ERGIC3, ERMN, ERMP1, ERN1, ERN2, ESR1, ESRRG, ETS2, ETV3, ETV4, ETV5, ETV6, EVC2, EWSR1, EXO1, EXOC4, F3, F11, F13A1, F5, F7, F8, FAH, FAM13A, FAM13B1, FAM13C1, FAM134A, FAM161A, FAM176B, FAM184A, FAM19A1, FAM20A, FAM23B, FAM65C, FANCA, FANCC, FANCG, FANCM, FANK1, FAR2, FBN1, FBX015, FBX018, FBXO38, FCGBP, FECH, FEZ2, FGA, FGD6, FGFR2, FGFR1OP, FGFR1OP2, FGFR2, FGG, FGR, FIX FKBP3, FLI1, FLJ35848, FLJ36070, FLNA, FN1, FNBP1L, FOLH1, FOSL1, FOSL2, FOXK1, FOAM1, FOXO1, FOXP4, FRAS1, FUT9, FXN, FZD3, FZD6, GAB1, GABPA, GALC, GALNT3, GAPDH, GART, GAS2L3, GATA3, GATAD2A, GBA, GBGT1, GCG, GCGR, GCK, GFI1, GFM1, GH1, GHR, GHV, GJA1, GLA, GLT8D1, GNA11, GNAQ, GNAS, GNB5, GOLGB1, GOLT1A, GOLT1B, GPATCH1, GPR158, GPR160, GPX4, GRAAMD3, GRHL1, GRHL2, GRHPR, GRIA1, GRIA3, GRIA4, GRIN2B, GRM3, GRM4, GRN, GSDMB, GSTCD, GSTO2, GTF2I, GTPBP4, HADHA, HAND2, HBA2, HBB, HCK, HDAC3, HDAC5, HDX, HEPACAM2, HERC1, HES7, HEXA, HEXB, HHEX, HIPK3, HLA-DPB1, HLA-G, HLCS, HLTF, HMBS, HMGA1, HMGCL, HNF1A, HNF1B, HNF4A, HNF4G, HNRNPH1, HOXC10, HP1BP3, HPGD, HPRT1, HPRT2, HSF1, HSF4, HSF2BP, HSPA9, HSPG2, HTT, HXA, ICA1, IDH1, IDS, IFI44L, IKBKAP, IKZF, IKZF3, ILIR2, IL5RA, IL7RA, I/MAIT, INPP5D, INSR, INTS3, INTU, IP04, IP08, IQGAP2, IRF2, IRF4, IRF8, IRX3, ISL1, ISL2, ITFG1, ITGA6, ITGAL, ITGB1, ITGB2, 1TGB3, ITGB4, ITIH1, ITPR2, IWS1, JAK1, JAK2, JAG1, JMJD1C, JPH3, KALRN, KAT6A, KATNAL2, KCNN2, KCNT2, KDM2A, KIAA0256, KIAA0528, KIAA0564, KIAA0586, KIAA1033, KIAA1166, KIAA1219, KIAA1409, KIAA1622, KIAA1787, KIF3B, KIF15, KIF16B, KIF5A, KIE5B, KIF9, KIN, KIR2DL5B, KIR3DL2, KIR3DL3, KIT, KLF3, KLF5, KLF7, KLF10, KLF12, KLF16, KLHL20, KLK12, KLKB1, KMT2A, KMT2B, KPNA5, KRAS, KREMEN1, KRIT1, KRT5, KRTCAP2, KYNU, LICAM, L3MBTL, L3MBTL2, LACE1, LAMA1, LAMA2, LAMA3, LAMB1, LARP7, LDLR, LEF1, LENG1, LGALS3, LGMN, LHCGR, LHX3, LHX6, LIMCH1, LIMK2, LIN28B, LIN54, LMBRD1, LMBRD2, LMLN, LMNA, LMO2, LMO7, LOC389634, LOC390110, LPA, LPCAT2, LPL, LRP4, LRPPRC, LRRK2, LRRC19, LRRC42, LRWD1, LUM, LVRN, LYN, LYST, MADD, MAGI1, MAGT1, MALT1, MAP2K1, MAP4K4, MAPK8IP3, MAPK9, MAPT, MARC1, MARCH5, MATN2, MBD3, MCF2L2, MCM6, MDGA2, MDM4, ASXL1, FUS, SPR54, MECOM, MEF2C, MEF2D, MEGF10, MEGF11, MEMO1, MET, MGA, MGAM, MGAT4A, MGAT5, MGC16169, MGC34774, MKKS, MIB1, MIER2, MITF, MKL2, MLANA, MLH1, MLL5, MLX, MME, MPDZ, MPI, MRAP2, MRPL11, MRPL39, MRPS28, MRPS35, MS4A13, MSH2, MSH3, MSMB, MST1R, MTDH, MTERF3, MTF1, MTF2, MTIF2, MTHFR, MUC2, MUT, MVK, MYB, MYBL2, MYC, MYCBP2, MYH2, MYRF, MYT1, MY019, MY03A, MY09B, MYOM2, MYOM3, NAG, NARG1, NARG2, NCOA1, NDC80, NDFIP2, NEB, NEDD4, NEK1, NEK5, NEK11, NF1, NF2, NFATC2, NFE2L2, NFIA, NFIB, NFIX, NFKB1, NFKB2, NFKBIL2, NFRKB, NFYA, NFYB, NIPA2, NKAIN2, NKAP, NLRC3, NLRC5, NLRP3, NLRP7, NLRP8, NLRP13, NME1, NME1-NME2, NME2, NME7, NOL10, NOP561, NOS1, NOS2A, NOTCH1, NPAS4, NPM1, NRID1, NRIH3, NRIH4, NR4A3, NR5A1, NRXN1, NSMAF, NSMCE2, NT5C, NT5C2, NT5C3, NUBP1, NUBPL, NUDT5, NUMA1, NUP88, NUP98, NUP160, NUPL1, OAT, OAZ1, OBFC2A, OBFC2B, OLIG2, OMA1, OPA1, OPN4, OPTN, OSBPL11, OSBPL8, OSGEPL1, OTC, OTX2, OVOL2, OXT, PA2G4, PADI4, PAH, PAN2, PAOX, PAPOLG, PARD3, PARP1, PARVB, PAWR, PAX3, PAX8, PBGD, PBRM1, PBX2, PCBP4, PCCA, PCGF2, PCNX, PCOTH, PDCD4, PDE4D, PDE8B, PDE10A, PD1A3, PDH1, PDLIM5, PDXK, PDZRN3, PELI2, PDK4, PDS5A, PDS5B, PGK1, PGM2, PHACTR4, PHEX, PHKB, PHLDB2, PHOX2B, PHTF1, PIAS1, PIEZO1, PIGF, PIGN, PIGT, PIK3C2G, PIK3CA, PIK3CD, PIK3CG, PIK3R1, PIP5K1A, PITRM1, PIWIL3, PKD1, PKHD1L1, PKD2, PKIB, PKLR, PKM1, PKM2, PLAGL2, PLCB1, PLCB4, PLCG1, PLD1, PLEKHA5, PLEKHA7, PLEKHM1, PLKR, PLXNC1, PMFBP1, POLN, POLR3D, POMT2, POSTN, POU2AF1, POU2F2, POU2F3, PPARA, PPFIA2, PPPIR12A, PPP3CB, PPP4C, PPP4RIL, PPP4R2, PRAME, PRC1, PRDM1, PREX1, PREX2, PRIM1, PRIM2, PRKARIA, PRKCA, PRKG1, PRMT7, PROC, PROCR, PROSC, PRODH, PROX1, PRPF40B, PRPF4B, PRRG2, PRUNE2, PSD3, PSEN1, PSMAL, PTCH1, PTEN, PTK2, PTK2B, PTPN2, PTPN3, PTPN4, PTPN11, PTPN22, PTPRD, PTPRK, PTPRM, PTPRN2, PTPRT, PUS10, PVRL2, PYGM, QRSL1, RABI1FIP2, RAB23, RAF1, RALBP1, RALGDS, RB1CC1, RBL2, RBM39, RBM45, RBPJ, RBSN, REC8, RELB, RFC4, RFT1, RFTN1, RHOA, RHPN2, RIF1, RIT1, RLN3, RMND5B, RNFI1, RNF32, RAFT1, RNGTT, ROCK1, ROCK2, RORA, RP1, RP6KA3, RP11-265F1, RP13-36C9, RPAP3, RPN1, RPGR, RPL22, RPL22L1, RPS6KA6, RREB1, RRM1, RRPIB, RSK2, RTEL1, RTF, RUFY1, RUNX1, RUNX2, RXRA, RYR3, SAAL1, SAE1, SALL4, SAT1, SATB2, SBCAD, SCN1A, SCN2A, SCN3A, SCN4A, SCN5A, SCN8A, SCNA, SCN11A, SCO1, SCYL3, SDC1, SDK1, SDK2, SEC24A, SEC24D, SEC31A, SEL1L, SENP3, SENP6, SENP7, SERPINA1, SETD3, SETD4, SETDB1, SEZ6, SFRS12, SGCE, SGOL2, SGPL1, SH2D1A, SH3BGRL2, SH3PXD2A, SH3PXD2B, SH3RF2, SH3TC2, SHOC2, SIPA1L2, SIPA1L3, SIVA1, SKAP1, SKIV2L2, SLC6A11, SLC6A13, SLC6A6, SLC7A2, SLC12A3, SLC13A1, SLC22A17, SLC25A14, SLC28A3, SLC33A1, SLC35F6, SLC38A1, SLC38A4, SLC39A10, SLC4A2, SLC6A8, SMARCA1, SMARCA2, SMARCA5, SMARCC2, SMC5, SMN2, SMOX SMS, SMTN, SNCAIP, SNORD86, SNRK, SNRP70, SNX5, SNX6, SOD1, SOD10, SOS, SOS2, SOX5, SOX6, SOX8, SP1, SP2, SP3, SPH10, SPAG9, SPATA13, SPATA4, SPATS1, SPECC1L, SPDEF, SP11, SPINK5, SPP2, SPTA1, SRF, SRM, SRP72, SSX3, SSX5, SSX9, STAG1, STAG2, STAMBPLI, STARD6, STAT1, STAT3, STAT5A, STAT5B, STAT6, STK17B, STX3, STXBP1, SUCLG2, SULF2, SUPT6H, SUPT16H, SV2C, SYCP2, SYT6, SYCP1, SYTL3, SYTL5, TAF2, TARDBP, TBCID3G, TBCID8B, TBCID26, TBCID29, TBCEL, TBK1, TBP, TBPL1, TBR1, TBX, TCEB3, TCF3, TCF4, TCF7L2, TCFL5, TCF12, TCP11L2, TDRD3, TEAD1, TEAD3, TEAD4, TECTB, TEK, TERF1, TERF2, TET2, TFAP2A, TFAP2B, TFAP2C, TFAP4, TFDP1, TFRC, TG, TGM7, TGS1, THAP7, THAP12, THOC2, TIAL1, TIAM2, TIMM50, TLK2, TM4SF20, TM6SF1, TMEM27, TMEM77, TMEM156, TMEM194A, TMF1, TMPRSS6, TNFRSF10A, TNFRSF10B, TNFRSF8, TNK2, TNKS, TNKS2, TOM1L1, TOM1L2, TOP2B, TP53, TP53INP1, TP53BP2, TP53I3, TP63, TRAF3IP3, TRAPPC2, TRIM44, TRIM65, TRIML1, TRIML2, TRPM3, TRPM5, TRPM7, TRPS1, TSC1, TSC2, TSHB, TSPAN7, TTC17, TTF1, TTLL5, TTLL9, TTN, TTPAL, TTR, TUSC3, TXNDC10, UBE3A, UCK1, UGTIA1, UHRFIBP1, UNC45B, UNC5C, USH2A, USF2, USP1, USP6, USP18, USP38, USP39, UTP20, UTP15, UTP18, UTRN, UTX, UTY, UVRAG, UXT, VAPA, VEGFA, VPS29, VPS35, VPS39, VT11A, VTI1B, VWA3B, WDFY2, WDR16, WDR17, WDR26, WDR44, WDR67, WDTC1, WRN, WRNIP1, WT1, WWC3, XBP1, XRN1, XRN2, XX-FW88277, YAP1, YARS, YBX1, YGM, YY1, ZBTB18, ZBTB20, ZC3HAV1, ZC3HC1, ZC3H7A, ZDHHC19, ZEB1, ZEB2, ZFPM1, ZFYVE1, ZFX, ZIC2, ZNF37A, ZNF91, ZNF114, ZNF155, ZNF169, ZNF205, ZNF236, ZNF317, ZNF320, ZNF326, ZNF335, ZNF365, ZNF367, ZNF407, ZNF468, ZNF506, ZNF511, ZNF511-PRAP, ZNF519, ZNF521, ZNF592, ZNF618, ZNF763, and ZWINT.

[0156] Additional exemplary genes encoding a target sequence (e.g., a target sequence comprising DNA or RNA, e.g., pre-mRNA) include genes include A1CF, A4GALT, AAR2, ABAT, ABCA11P, ZNF721, ABCA5, ABHD10, ABHD13, ABHD2, ABHD6, AC0000120.3, KRIT1, AC004076.1, ZNF772, AC004076.9, ZNF772, AC004223.3, RAD51D, AC004381.6, AC006486.1, ERF, AC0007390.5, AC0007780.1, PRKARIA, AC0007998.2, INO80C, AC0009070.1, CMC2, AC009879.2, AC009879.3, ADHFE1, AC010487.3, ZNF816-ZNF321P, ZNF816, AC010328.3, AC010522.1, ZNF587B, AC010547.4, ZNF19, AC012313.3, ZNF497, AC012651.1, CAPN3, AC013489.1, DET1, AC016747.4, C2orf74, AC020907.6, FXYD3, AC021087.5, PDCD6, AHRR, AC022137.3, ZNF761, AC025283.3, NAA60, AC027644.4, RABGEF1, AC055811.2, FLCN, AC069368.3, ANKDD1A, AC073610.3, ARF3, AC074091.1, GPN1, AC079447.1, LIPT1, AC092587.1, AC079594.2, TRIM59, AC091060.1, C18orf21, AC092143.3, MC1R, AC093227.2, ZNF607, AC093512.2, ALDOA, AC098588.1, ANAPC10, AC107871.1, CALML4, AC114490.2, ZMYM6, AC138649.1, NIPA1, AC138894.1, CLN3, AC139768.1, AC242426.2, CHD1L, ACADM, ACAP3, ACKR2, RP11-141M3.5, KRBOX1, ACMSD, ACOT9, ACP5, ACPL2, ACSBG1, ACSF2, ACSF3, ACSL1, ACSL3, ACVR1, ADAL, ADAM29, ADAMTS10, ADAMTSL5, ADARB1, ADAT2, ADCK3, ADD3, ADGRG1, ADGRG2, ADH1B, ADIPOR1, ADNP, ADPRH, AGBL5, AGPAT1, AGPAT3, AGR2, AGTR1, AHDC1, AHI1, AHNAK, AIFM1, AIFM3, AIMP2, AK4, AKAP1, AKNAD1, CLCC1, AKRIA1, AKT1, AKT1S1, AKT2, AL139011.2, PEX19, AL157935.2, ST6GALNAC6, AL358113.1, TJP2, AL441992.2, KYAT1, AL449266.1, CLCC1, AL590556.3, LINC00339, CDC42, ALAS1, ALB, ALDH16A1, ALDH1B1, ALDH3A1, ALDH3B2, ALDOA, ALKBH2, ALPL, AMD1, AMICA1, AMN1, AMOTL2, AMY1B, AMY2B, ANAPC10, ANAPC11, ANAPC15, ANG, RNASE4, AL163636.2, ANGEL2, ANGPTL1, ANKMY1, ANKRD11, ANKRD28, ANKRD46, ANKRD9, ANKS3, ANKS3, RP11-127I20.7, ANKS6, ANKZF1, ANPEP, ANXA11, ANXA2, ANXA8L2, AL603965.1, AOC3, AP000304.12, CRYZL1, AP000311.1, CRYZL1, AP000893.2, RAB30, AP001267.5, ATP5MG, AP002495.2, AP003175.1, OR2AT4, AP003419.1, CLCF1, AP005263.1, ANKRD12, AP006621.5, AP006621.1, AP1G1, AP3M1, AP3M2, APBA2, APBB1, APLP2, APOA2, APOL1, APOL3, APTX, ARAP1, STARD10, ARF4, ARFIP1, ARFIP2, ARFRP1, ARHGAP11A, ARHGAP33, ARHGAP4, ARHGEF10, ARHGEF3, ARHGEF35, OR2A1-AS1, ARHGEF35, OR2A1-AS1, ARHGEF34P, ARID1B, ARHGEF35, OR2A20P, OR2A1-AS1, ARHGEF9, ARL1, ARL13B, ARL16, ARL6, ARMC6, ARMC8, ARMCX2, ARMCX5, RP4-769N13.6, ARMCX5-GPRASP2, BHLHB9, ARMCX5-GPRASP2, GPRASP1, ARMCX5-GPRASP2, GPRASP2, ARMCX6, ARNT2, ARPP19, ARRB2, ARSA, ART3, ASB3, GPR75-ASB3, ASCC2, ASNS, ASNS, AC079781.5, ASPSCR1, ASS1, ASUN, ATE1, ATF1, ATF7IP2, ATG13, ATG4D, ATG7, ATG9A, ATM, ATOX1, ATP1B3, ATP2C1, ATP5F1A, ATP5G2, ATP5J, ATP5MD, ATP5PF, ATP6AP2, ATP6V0B, ATP6V1C1, ATP6V1D, ATP7B, ATXN1, ATXN1L, IST1, ATXN3, ATXN7L1, AURKA, AURKB, AXDND1, B3GALNT1, B3GALT5, AF064860.1, B3GALT5, AF064860.5, B3GNT5, B4GALT3, B4GALT4, B9D1, BACH1, BAIAP2, BANF1, BANF2, BAX, BAZ2A, BBIP1, BCHE, BCL2L14, BCL6, BCL9L, BCSIL, BDH1, BDKRB2, AL355102.2, BEST1, BEST3, BEX4, BHLHB9, BID, BIN3, BIRC2, BIVM, BIVM-ERCC5, BIVM, BLCAP, BLK, BLOC1S1, RP11-644F5.10, BLOC1S6, AC090527.2, BLOC1S6, RP11-96020.4, BLVRA, BMF, BOLA1, BORCS8-MEF2B, BORCS8, BRCA1, BRD1, BRDT, BRINP3, BROX BTBD10, BTBD3, BTBD9, BTD, BTF3L4, BTNL9, BUB1B-PAK6, PAK6, BUB3, C10orf68, C11orf1, C11orf48, C11orf54, C11orf54, AP001273.2, C11orf57, C11orf63, C11orf82, C12orf23, C12orf4, C12orf65, C12orf79, C14orf159, C14orf93, C17orf62, C18orf21, C19orf12, C19orf40, C19orf47, C19orf48, C19orf54, C1D, C1GALT1, C1QB, C1QTNF1, C1S, C1orf101, C1orf112, C1orf116, C1orf159, C1orf63, C2, C2, CFB, C20orf27, C21orf58, C2CD4D, C2orf15, LIPT1, MRPL30, C2orf80, C2orf81, C3orf14, C3orf17, C3orf18, C3orf22, C3orf33, AC104472.3, C4orf33, C5orf28, C5orf34, C6orf118, C6orf203, C6orf211, C6orf48, C7orf50, C7orf55, C7orf55-LUC7L2, LUC7L2, C8orf44-SGK3, C8orf44, C8orf59, C9, DAB2, C9orf153, C9orf9, CA5BP1, CA5B, CABYR, CALCA, CALCOCO1, CALCOCO2, CALM1, CALM3, CALML4, RP11-315D16.2, CALN1, CALU, CANT1, CANX CAP1, CAPN12, CAPS2, CARD8, CARHSP1, CARNS1, CASC1, CASP3, CASP7, CBFA2T2, CBS, CBY1, CCBL1, CCBL2, RBMXL1, CCDC12, CCDC126, CCDC14, CCDC149, CCDC150, CCDC169-SOHLH2, CCDC169, CCDC171, CCDC37, CCDC41, CCDC57, CCDC63, CCDC7, CCDC74B, CCDC77, CCDC82, CCDC90B, CCDC91, CCDC92, CCNE1, CCHCR1, CCL28, CCNB1IP1, CCNC, CCND3, CCNG1, CCP110, CCR9, CCT7, CCT8, CD151, CD1D, CD200, CD22, CD226, CD276, CD36, CD59, CDC26, CDC42, CDC42SE1, CDC42SE2, CDHR3, CDK10, CDK16, CDK4, CDKAL1, CDKL3, CTD-2410N18.4, CDKN1A, CDKN2A, CDNF, CEBPZOS, CELF1, CEMIP, CENPK, CEP170B, CEP250, CEP57, CEP57L1, CEP63, CERS4, CEL1, CFL2, CFLAR, CGNL1, CHCHD7, CHD1L, CHD8, CHFR, ZNF605, CHIA, CHID1, CHL1, CHM, CHMP1A, CHMP3, RNF103-CHMP3, CHRNA2, CIDEC, CIRBP, CITED1, CKLF-CMTM1, CMTM1, CKMT1B, CLDN12, CTB-13L3.1, CLDND1, AC021660.3, CLDND1, CPOX, CLHC1, CLIP1, CLUL1, CMC4, MTCP1, CNDP2, CNFN, CNOT1, CNOT6, CNOT7, CNOT8, CNR1, CNR2, CNTFR, CNTRL, COA1, COASY, COCH, COL8A1, COLCA1, COLEC11, COMMD3-BMI1, BMI1, COPS5, COPS7B, COQ8A, CORO6, COTL1, COX14, RP4-60503.4, COX7A2, COX7A2L, COX7B2, CPA4, CPA5, CPEB1, CPNE1, AL109827.1, RBM12, CPNE1, RP1-309K20.6, RBM12, CPNE3, CPSF3L, CPT1C, CREB3L2, CREM, CRP, CRYZ, CS, AC073896.1, CS, RP11-977G19.10, CSAD, CSDE, CSF2RA, CSGALNACT, CSK, CSNK2A1, CSRNP2, CT45A4, CT45A4, CT45A5, CT45A6, CTBP2, CTCFL, CTD-2116N17.1, KIAA0101, CTD-2349B8.1, SYT17, CTD-2528L19.4, ZNF607, CTD-2619J13.8, ZNF497, CTNNA1, CTNNBIP1, CTNND1, CTPS2, CTSB, CTSL, CTTN, CUL2, CUL9, CWC15, CXorf40B, CYB561A3, CYBC1, CYLD, CYP11A1, CYP2R1, CYP4B1, CYP4F22, DAG1, DAGLB, KDELR2, DARS, DBNL, DCAF11, DCAF8, PEX19, DCLREIC, DCTD, DCTN1, DCTN4, DCUNID2, DDR1, DDX11, DDX19B, AC012184.2, DDX19B, RP11-529K.3, DDX25, DDX39B, ATP6V1G2-DDX39B, SNORD84, DDX42, DDX60L, DEDD, DEDD2, DEFA1, DEFA1B, DEFA1B, DEFA3, DENNDIC, DENND2A, DENND4B, DET1, DGKA, DGKZ, DGLUCY, DHRS4L2, DHRS9, DHX40, DIABLO, AC048338.1, DIAPH1, DICER1, DKKL1, DLG1, DLG3, DLST, DMC1, DMKNV, DMTF1, DMTN, DNAJC14, DNAJC19, DNAL1, DNASE1L1, DNMT3A, DOC2A, DOCK8, DOK1, DOPEY1, DPAGT1, DPP8, DRAM2, DRD2, DROSHA, DSN1, DTNA, DTX2, DTX3, DUOX1, DUOXA1, DUS2, DUSP10, DUSP13, DUSP18, DUSP22, DYDC1, DYDC2, DYNLL1, DYNLT1, DYRK1A, DYRK2, DYRK4, RP11-500M8.7, DZIP1L, E2F6, ECHDC1, ECSIT, ECT2, EDC3, EDEM1, EDEM2, MMP24-AS1, RP4-614O4.1H, EEF1AKNMT, EEF1D, EFEMP1, EFHC1, EGFL7, EHF, EI24, EIF1AD, EIF2B5, EIF4G1, EIF2B5, POLR2H, EIF3E, EIF3K, EIF4E3, EIF4G1, ELF1, ELMO2, ELMOD1, AP000889.3, ELMOD3, ELOC, ELOF1, ELOVL, ELOVL7, ELP1, ELP6, EML3, EMP3, ENC1, ENDOV, ENO1, ENPP5, ENTHD2, ENTPD6, EP400NL, EPB41L1, EPDR1, NME8, EPHX1, EPM2A, EPN1, EPN2, EPN3, EPS8L2, ERBB3, ERC1, ERCC1, ERG, ERI2, ERI2, DCUN1D3, ERLIN2, ERMARD, ERRFI1, ESR2, RP11-544I20.2, ESRRA, ESRRB, ESRRG, ETFA, ETFRF1, ETV1, ETV4, ETV7, EVA1A, EVC2, EVX1, EXD2, EXO5, EXOC1, EXOC2, FAAP24, FABP6, FADS1, FADS2, FAHD2B, FAM107B, FAM111A, FAM111B, FAM114A1, FAM114A2, FAM115C, FAM115C, FAM115D, FAM120B, FAM133B, FAM135A, FAM153A, FAM153B, FAM154B, FAM156A, FAM156B, FAM168B, FAM172A, FAM182B, FAM192A, FAM19A2, FAM200B, FAM220A, FAM220A, AC009412.1, FAM222B, FAM227B, FAM234A, AC004754.1, FAM3C, FAM45A, FAM49B, FAM60A, FAM63A, FAM81A, FAM86B1, FAM86B2, FANCI, FANK1, FAR2, FAXC, FAXDC2, FBF1, FBH1, FBXL4, FBX018, FBXO22, FBXO31, FBXO41, FBXO44, FBXO45, FBXW9, FCHO1, FCHSD2, FDFT1, FDPS, FER, FETUB, FGD4, FGF1, FGFR1, FGFRL1, FGL1, FHL2, FIBCD1, FIGNL1, FIGNL1, DDC, FKBP5, FKRP, FLRT2, FLRT3, FMC1, LUC7L2, FMC1-LUC7L2, FNDC3B, FOLH1, FOLR1, FOXP1, FOXK1, FOAM1, FOXO1, FOXP4, AC097634.4, FOXRED1, FPR1, FPR2, FRG1B, FRS2, FTO, FTSJ1, FUK, FUT10, FUT3, FUT6, FXYD3, FZD3, G2E3, GAA, GABARAPL1, GABPB1, GABRA5, GAL3ST1, GALE, GALNT11, GALNT14, GALNT6, GAPVD1, GARNL3, GAS2L3, GAS8, GATA1, GATA2, GATA4, GBA, GCNT1, GDPD2, GDPD5, GEMIN7, MARK4, GEMIN8, GGA3, GGACT, AL356966.1, GGPS1, GHRL, GID8, GIGYF2, GIMAP8, GIPC1, GJB1, GJB6, GLB1L, GLI1, GLT8D1, GMFG, GMPR2, GNAI2, GNAQ, GNB1, GNB2, GNE, GNG2, GNGT2, GNPDA1, GNPDA2, GOLGA3, CHFR, GOLGA4, GOLPH3L, GOLT1B, GPBPL, GPER, GPR16, GPR141, EPDR1, GPR155, GPR161, GPR56, GPR63, GPR75-ASB3, ASB3, GPR85, GPSM2, GRAMD1B, GRB10, GRB7, GREM2, GRIA2, GSDMB, GSE1, GSN, GSTA4, GSTZ1, GTDC1, GTF2H1, GTF2H4, VARS2, GTF3C2, GUCY1A3, GUCYIB3, GUK1, GULP1, GYPC, GYS1, GZF1, HAGH, HA02, HAPLN3, HAVCR1, HAX1, HBG2, AC104389.4, HBG2, AC104389.4, HBE1, HBG2, AC104389.4, HBE1, OR51B5, HBG2, HBE1, AC104389.28, HBS1L, HCFC1R1, HCK, HDAC2, HDAC6, HDAC7, HDLBP, HEATR4, HECTD4, HEXIM2, HHAT, HHATL, CCDC13, HINFP, HIRA, C22orf39, HIVEP3, HJV, HKR1, HLF, HMBOX1, HMGA1, HMGB3, HMGCR, HMGN4, HMOX2, HNRNPC, HNRNPD, HNRNPH1, HNRNPH3, HNRNPR, HOMER3, HOPX, HOXA3, HOXB3, HOXB3, HOXB4, HOXC4, HOXD3, HOXD3, HOXD4, HPCAL1, HPS4, HPS5, HRH1, HS3ST3A1, HSH2D, HSP90AA1, HSPD1, HTT, HUWE1, HYOU1, IAH1, ICA1L, ICAM2, ICE2, ICK, IDH2, IDH3G, IDS, IFI27, IFI44, IFT20, IFT22, IFT88, IGF2, INS-IGF2, IGF2BP3, IGFBP6, IKBKAP, IKBKB, ILI1, IL18BP, IL18RAP, IL1RAP, IL1RL1, IL18R1, ILIRN, IL32, IL4I1, NUP62, AC011452.1, IL4I1, NUP62, CTC-326K19.6, IL6ST, ILVBL, IMAMP1L, IMPDH1, INCA1, ING1, INIP, INPP1, INPP5J, INPP5K, INSIG2, INTS11, INTS12, INTS14, IP6K2, IP6K3, IPOI1, LRRC70, IQCE, IQGAP3, IRAK4, IRF3, IRF5, IRF6, ISG20, IST1, ISYNA1, ITFG2, ITGB1BP1, ITGB7, ITIH4, RP5-966M1.6, ITPRIPL1, JADE1, JAK2, JARID2, JDP2, KANK1, KANK1, RP11-31F19.1, KANK2, KANSL1L, KAT6A, KBTBD2, KBTBD3, KCNAB2, KCNE3, KCNG1, KCNJ16, KCNJ9, KCNMB2, AC117457.1, LINC01014, KCTD20, KCTD7, RABGEF1, KDM1B, KDM4A, AL451062.3, KHNYN, KIAA0040, KIAA0125, KIAA0196, KIAA0226L, PPPIR2P4, KIAA0391, KIAA0391, AL121594.1, KIAA0391, PSMA6, KIAA0753, KIAA0895, KIAA0895L, KIAA1191, KIAA1407, KIAA1841, C2orf74, KIF12, KIF14, KIF27, KIF9, KIFC3, KIN, KIRREL1, KITLG, KLC1, APOPT1, AL139300.1, KLC4, KLHDC4, KLHDC8A, KLHL13, KLHL18, KLHL2, KLHL24, KLHL7, KLK11, KLK2, KLK5, KLK6, KLK7, KNOP1, KRBA2, AC135178.2, KRBA2, RPII-849F2.7, KRIT1, KRT15, KRT8, KTN1, KXD1, KYAT3, RBMXL1, KYNU, L3MBTL1, LACC1, LARGE, LARP4, LARP7, LAT2, LBHD1, LCA5, LCA5L, LCTL, LEPROTL1, LGALS8, LGALS9C, LGMN, LHFPL2, LIG4, LIMCH1, LIMK2, LIMS2, LINC00921, ZNF263, LIPF, LLGL2, LMAN2L, LMCD, LMF1, RP11-161M6.2, LMO1, LM03, LOXHD1, LPAR1, LPAR2, LPAR4, LPAR5, LPAR6, LPHN1, LPIN2, LPIN3, LPP, LRFN5, LRIF1, LRAMP, LRRC14, LRRC20, LRRC24, C8orf82, LRRC39, LRRC42, LRRC48, LRRC4C, LRRC8A, LRRC8B, LRRD1, LRTOMT, LRTOMT, AP000812.5, LSM7, LTB4R, LTBP3, LUC7L2, FMC1-LUC7L2, LUC7L3, LUZP1, LYG1, LYL1, LYPD4, LYPD6B, LYRM1, LYRM5, LYSMD4, MACC1, MADIL1, MAD1L1, AC069288.1, MAEA, MAFF, MAFG, MAFK, MAGEA12, CSAG4, MAGEA2, MAGEA2B, MAGEA4, MAGEB1, MAGOHB, MAN2A2, MANBAL, MAOB, MAP2K3, MAP3K7CL, MAP3K8, MAP7, MAP9, MAPK6, MAPK7, MAPK8, MAPKAP1, 10-Mar, 7-Mar, 8-Mar, MARK2, MASP1, MATK, MATR3, MATR3, SNHG4, MB, MBD5, MBNL1, MBOAT7, MCC, MCFD2, MCM9, MCOLN3, MCRS1, MDC1, MDGA2, MDH2, MDM2, ME1, MEAK7, MECR, MED4, MEF2A, MEF2B, BORCS8-MEF2B, MEF2BNB-MEF2B, MEF2B, MEF2BNB, MEF2C, MEF2D, MEGF10, ME11, MEIS2, MELK, MET, METTL13, METTL23, MFF, MFN2, MFSD2A, MGST3, MIB2, MICAL1, MICAL3, MICOSI0, NBL1, MICOSI0-NBL1, MID1, MINA, MINOS1-NBL1, MINOS1, MIOS, MIPOL1, MIS12, MKLN1, MKNK1, MKNK1, MOB3C, MLF2, MLH1, MMP17, MOBP, MOCS1, MOGS, MOK, MORF4L1, MPC1, MPC2, MPG, MP1, MPP1, MPP2, MPPE1, MPST, MRAS, MRO, MROH1, MROH7-TTC4, MROH7, MRPL14, MRPL24, MRPL33, BABAM2, MRPL33, BRE, MRPL47, MRPL48, MRPL55, MRRF, MRTFA, MRTFB, MRVI1, MS4A1, MS4A15, MS4A3, MS4A6E, MS4A7, MS4A14, MSANTD3, MSANTD4, MSH5, MSH5-SAPCD, MSL2, MSRB3, MSS51, MTCP1, CMC4, MTERF, MTERF1, MTERF3, MTERFD2, MTERFD3, MTF2, MTG2, MTHFD2, MTHFD2L, MTIF2, MTIF3, MTMR10, MTRF1, MTRR, MTUS2, MUTYH, MVK, MX1, MX2, MYH10, MYL12A, MYB, MYD88, MYL5, MYLIP, MYNN, MYO15A, MYO1B, MYOM2, MZF1, N4BP2L2, NAA60, NAB1, NAE1, NAGK, NAP1L1, NAP1L4, NAPG, NARFL, NARG2, NAT1, NAT10, NBPF11, WI2-3658N16.1, NBPF12, NBPF15, NBPF24, NBPF6, NBPF9, NBR1, NCAPG2, NCBP2, NCEH1, NCOA1, NCOA4, NDC1, NDRG1, NDRG2, NDRG4, NDST1, NDUFAF6, NDUFB2, NDUFC1, NDUFS1, NDUFS8, NDUFV1, NEDD1, NEIL1, NEIL2, NEK10, NEK11, NEK6, NEK9, NELFA, NEU4, NFAT5, NFE2, NFE2L2, AC019080.1, NFRKB, NFYA, NFYC, NIF3L1, NIPA2, NKIRAS1, NKX2-1, NLRC3, NME1, NME1-NME2, NME2, NME1-NME2, NME2, NME4, NME6, NME9, NOD1, NOL10, NOL8, NONO, NPAS1, NPIPA8, RPII-1212A22.1, NPIPB3, NPIPB4, NPIPB9, NPL, NPM1, NPPA, NQO2, NRIH3, NR2C2, NR2F2, NR4A1, NRDC, NREP, NRF1, NRG4, NRIP1, NSD2, NSDHL, NSG1, NSMCE2, NSRP1, NT5C2, NTF4, NTMT1, NTNG2, NUBP2, NUCB2, NUDT1, NUDT2, NUDT4, NUF2, NUMBL, NUP50, NUP54, NUP85, NVL, NXF1, NXPE1, NXPE3, OARD1, OAT, OAZ2, OCIAD1, OCLN, ODF2, OGDHL, OGFOD2, AC026362.1, OGFOD2, RPII-197N18.2, OLA1, OPRL1, OPTN, OR2H1, ORAI2, ORMDL1, ORMDL2, ORMDL3, OSBPL2, OSBPL3, OSBPL5, OSBPL9, OSER1, OSGIN1, OSR2, P2RX4, P2RY2, P2RY6, P4HA2, PABPC1, PACRGL, PACSIN3, PADI1, PAIP2, PAK1, PAK3, PAK4, PAK7, PALB2, PANK2, PAQR6, PARPH1, PARVG, PASK, PAX6, PBRM1, PBXIP1, PCBP3, PCBP4, AC115284.1, PCBP4, RP11-155D18.14, RP11-155D18.12, PCGF3, PCGF5, PCNP, PCSK9, PDCD10, PDCD6, AHRR, PDDC1, PDGFRB, PDIA6, PDIK1L, PDLIM7, PDP1, PDPK1, PDPN, PDZD11, PEA15, PEX2, PEX5, PEX5L, PFKM, PFN4, PGAP2, PGAP2, AC090587.2, PGAP3, PGM3, PGPEP1, PHB, PHC2, PHF20, PHF21A, PHF23, PHKB, PHLDB1, PHOSPHO1, PHOSPHO2, KLHL23, PI4 KB, PIAS2, PICALM, PIF1, PIGN, PIGO, PIGT, PIK3CD, PILRB, STAG3L5P-PVRIG2P-PILRB, PIP5K1B, PIR, PISD, PIWIL4, FUT4, PKD2, PKIA, PKIG, PKM, PKN2, PLA1A, PLA2G2A, PLA2G5, PLA2G7, PLAC8, PLAGL1, PLD1, PLD3, PLEKHA1, PLEKHA2, PLEKHA6, PLEKHG5, PLIN1, PLS1, PLS3, PLSCR1, PLSCR2, PLSCR4, PLXNB1, PLXNB2, PMP22, PMS1, PNISR, PNKP, AKTIS1, PNMT, PNPLA4, PNPLA8, PNPO, PNRC1, POCIB, POFUT1, POLB, POLD1, POLH, POLI, POLL, POLR1B, POM121, POM121C, AC006014.7, POM121C, AC211429.1, POMC, POMT1, POP1, PORCN, POU5F1, PSORS1C3, PPARD, PPARG, PPHLN1, PPIL3, PPIL4, PPM1A, PPM1B, AC013717.1, PPP1CB, PPP1R11, PPPIR13L, PPPIR26, PPPIR9A, PPP2R2B, PPP3CA, PPP6R1, PPP6R3, PPT2, PPT2-EGFL8, EGFL8, PPWD1, PRDM2, PRDM8, PRELID3A, PREPL, PRICKLE1, PRKAG1, PRMT2, PRMT5, PRMT7, PROM1, PRPS1, PRPSAP2, PRR14L, PRR15L, PRR5, PRR5-ARHGAP8, PRR5L, PRR7, PRRC2B, PRRT4, PRSS50, PRSS45, PRSS44, PRUNE, PRUNE1, PSEN1, PSMA2, PSMF1, PSORS1C1, PSPH, PSRCl, PTBP3, PTHLH, PTK2, PTPDC1, PTPRM, PUF60, PUM2, PUS1, PUS10, PXA, PXYLP1, PYCR1, QRICH1, R3HCC1L, R3HDM2, RAB17, RAB23, RAB3A, RAB3D, TMEM205, RAB4B-EGLN2, EGLN2, AC008537.1, RAB5B, RAB7L1, RABL2A, RABL2B, RABL5, RACGAP1, RAD17, RAD51L3-RFFL, RAD51D, RAD52, RAE1, RAI14, RAI2, RALBP1, RAN, RANGAP1, RAP1A, RAP1B, RAP1GAP, RAPGEF4, RAPGEFL1, RASGRP2, RASSF1, RBCK1, RBM12B, RBM14, RBM4, RBM14-RBM4, RBM23, RBM4, RBM14-RBM4, RBM47, RBM7, AP002373.1, RBM7, RP11-212D19.4, RBMS2, RBMY1E, RBPJ, RBPMS, RBSN, RCBTB2, RCC1, RCC1, SNHG3, RCCD1, RECQL, RELL2, REPIN1, AC073111.3, REPIN1, ZNF775, RER1, RERE, RFWD3, RFX3, RGL2, RGMB, RGS11, RGS3, RGS5, AL592435.1, RHBDD1, RHNO1, TULP3, RHOC, AL603832.3, RHOC, RPII-426L16.10, RHOH, RIC8B, RIMKLB, RIN1, RIPK2, RIT1, RLIM, RNASE4, ANG, AL163636.6, RNASEK, RNASEK-C17orf49, RNFI11, RNF123, RNF13, RNF14, RNF185, RNF216, RNF24, RNF32, RNF34, RNF38, RNF4, RNF44, RNH1, RNMT, RNPS1, RO60, ROPN1, ROPN1B, ROR2, RP1-102H19.8, C6orf163, RP1-283E3.8, CDK11A, RPII-120M18.2, PRKARIA, RPII-133K10.2, PAK6, RPII-164J13.1, CAPN3, RP11-21J18.1, ANKRD12, RPII-322E1.6, INO80C, RPII-337C18.10, CHD1L, RPII-432B6.3, TRIM59, RPII-468E2.4, IRF9, RPII-484M3.5, UPK1B, RPII-517H2.6, CCR6, RPII-613M10.9, SLC25A51, RPII-659G9.3, RAB30, RPII-691N7.6, CTNND, RPII-849H4.2, RP11-896J10.3, NKX2-1, RPII-96020.4, SQRDL, RP11-986E7.7, SERPINA3, RP4-769N13.6, GPRASP1, RP4-769N13.6, GPRASP2, RP4-798P15.3, SEC16B, RP5-10211I20.4, ZNF410, RP6-109B7.3, FLJ27365, RPE, RPH3AL, RPL15, RPL17, RPL17-C18orf32, RPL17, RPL23A, RPL36, HSD11B1L, RPP38, RPS20, RPS27A, RPS3A, RPS6KA3, RPS6KC1, RPS6KL1, RPUSD1, RRAGD, RRAS2, RRBP1, RSL1D1, RSRC2, RSRP1, RUBCNL, RUNX1T1, RUVBL2, RWDD1, RWDD4, S100A13, AL162258.1, S100A13, RP1-178F15.5, S100A16, S100A4, S100A3, S100A6, S100PBP, SAA1, SACM1L, SAMD4B, SAR1A, SARAF, SARNP, RPII-762I7.5, SCAMP5, SCAP, SCAPER, SCFD1, SCGB3A2, SCIN, SCML1, SCNN1D, SCO2, SCOC, SCRN1, SDC2, SDC4, SEC13, SEC14L1, SEC14L2, SEC22C, SEC23B, SEC24C, SEC61G, SEMA4A, SEMA4C, SEMA4D, SEMA6C, SENP7, SEPP1, 11-Sep, 2-Sep, SERGEF, AC055860.1, SERP1, SERPINA1, SERPINA5, SERPINB6, SERPING1, SERPINH1, SERTAD3, SETD5, SFMBT1, AC096887.1, SFTPA1, SFTPA2, SFXN2, SGCD, SGCE, SGK3, SGK3, C8orf44, SH2B1, SH2D6, SH3BP, Z83844.3, SH3BP2, SH3BP5, SH3D19, SH3YL1, SHC1, SHISA5, SHMT1, SHMT2, SHOC2, SHROOM1, SIGLEC5, SIGLEC14, SIL1, SIN3A, SIRT2, SIRT6, SKP1, STAT4, AC104109.3, SLAIN1, SLC10A3, SLC12A9, SLC14A1, SLC16A6, SLC1A2, SLC1A6, SLC20A2, SLC25A18, SLC25A19, SLC25A22, SLC25A25, SLC25A29, SLC25A30, SLC25A32, SLC25A39, SLC25A44, SLC25A45, SLC25A53, SLC26A11, SLC26A4, SLC28A1, SLC29A1, SLC2A14, SLC2A5, SLC2A8, SLC35B2, SLC35B3, SLC35C2, SLC37A1, SLC38A1, SLC38A11, SLC39A13, SLC39A14, SLC41A3, SLC44A3, SLC4A7, SLC4A8, SLC5A10, SLC5A11, SLC6A1, SLC6A12, SLC6A9, SLC7A2, SLC7A6, SLC7A7, SLCO1A2, SLCO1C1, SLCO2B1, SLFN11, SLFN12, SLFNL1, SLMO1, SLTM, SLU7, SMAD2, SMAP2, SMARCA2, SMARCE, AC073508.2, SMARCE1, KRT222, SMC6, SMG7, SMIM22, SMOX, SMPDL3A, SMTN, SMU1, SMUG1, SNAP25, SNCA, SNRK, SNRPC, SNRPD1, SNRPD2, SNRPN, SNRPN, SNURF, SNUPN, SNX11, SNX16, SNX17, SOAT1, SOHLH2, CCDC169-SOHLH2, CCDC169, SORBS1, SORBS2, SOX5, SP2, SPART, SPATA20, SPATA21, SPATS2, SPATS2L, SPDYE2, SPECC1, SPECC1L, SPECC1L-ADORA2A, SPECC1L-ADORA2A, ADORA2A, SPEG, SPG20, SPG21, SPIDR, SPIN1, SPOCD1, SPOP, SPRR2A, SPRR2B, SPRR2E, SPRR2B, SPRR2F, SPRR2D, SPRR3, SPRY1, SPRY4, SPTBN2, SRC, SRGAP1, SRP68, SRSF11, SSX1, SSX2IP, ST3GAL4, ST3GAL6, ST5, ST6GALNAC6, ST7L, STAC3, STAG1, STAG2, STAMBP, STAMBPL1, STARD3NL, STAT6, STAU1, STAU2, AC022826.2, STAU2, RP11-463D19.2, STEAP2, STEAP3, STIL, STK25, STK33, STK38L, STK40, STMN, STON, STON-GTF2AIL, STRAP, STRBP, STRC, AC011330.5, STRC, CATSPER2, STRC, CATSPER2, AC011330.5, STRC, STRCP1, STT3A, STX16-NPEPL1, NPEPL1, STX5, STX6, STX8, STXBP6, STYK, SULTIA1, SULTIA2, SUMF2, SUN1, SUN2, SUN2, DNAL4, SUOX, SUPT6H, SUV39H2, SV2B, SYBU, SYNCRIP, SYNJ2, SYT, SYTL4, TAB2, TACC, TADA2B, TAF1C, TAF6, AC073842.2, TAF6, RP11-506M12.1, TAF9, TAGLN, TANK, TAPSAR1, PSMB9, TAPT1, TATDN1, TAZ, TBC1D1, TBC1D12, HELLS, TBC1D15, TBC1D3H, TBC1D3G, TBCID5, TBCID5, SATB1, TBCA, TBCEL, TBCEL, AP000646.1, TBL1XR1, TBP, TBX5, TBXAS1, TCAF1, TCEA2, TCEAL4, TCEAL8, TCEAL9, TCEANC, TCEB1, TCF19, TCF25, TCF4, TCP1, TCP10L, AP000275.65, TCP11, TCP11L2, TCTN1, TDG, TDP1, TDRD7, TEAD2, TECR, TENC1, TENT4A, TEX264, TEX30, TEX37, TFDP1, TFDP2, TFEB, TFG, TFP1, TF, TFPI, TGIF1, THAP6, THBS3, THOC5, THRAP3, THUMPD3, TIAL1, TIMM9, TIMP1, TIRAP, TJAP1, TJP2, TK2, TLDC1, TLE3, TLE6, TLN1, TLR10, TM9SF1, TMBIM1, TMBIM4, TMBIM6, TMC6, TMCC1, TMCO4, TMEM126A, TMEM139, TMEM150B, TMEM155, TMEM161B, TMEM164, TMEM168, TMEM169, TMEM175, TMEM176B, TMEM182, TMEM199, CTB-96E2.3, TMEM216, TMEM218, TMEM230, TMEM263, TMEM45A, TMEM45B, TMEM62, TMEM63B, TMEM66, TMEM68, TMEM98, TMEM9B, TMPRSS11D, TMPRSS5, TMSB15B, TMTC4, TMUB2, TMX2-CTNND1, RPII-691N7.6, CTNND1, TNFAIP2, TNFAIP8L2, SCNM1, TNFRSF10C, TNFRSF9, TNFRSF8, TNFSF12-TNFSF3, TNFSF2, TNFSF3, TNFSF12-TNFSF3, TNFSF3, TNIP1, TNK2, TNNT1, TNRC18, TNS3, TOB2, TOM1L1, TOP1MT, TOP3B, TOX2, TP53, RP11-199F11.2, TP53I1, TP53INP2, TPCN1, TPM3P9, AC022137.3, TPT1, TRA2B, TRAF2, TRAF3, TRAPPC12, TRAPPC3, TREH, TREX1, TREX2, TRIB2, TRIM3, TRIM36, TRIM39, TRIM46, TRIM6, TRIM6-TRIM34, TRIM6-TRIM34, TRIM34, TRIM66, TRIM73, TRIT1, TRMT10B, TRMT2B, TRMT2B-AS1, TRNT1, TRO, TROVE2, TRPS1, TRPT1, TSC2, TSGA10, TSPAN14, TSPAN3, TSPAN4, TSPAN5, TSPAN6, TSPAN9, TSPO, TTC12, TTC23, TTC3, TTC39A, TTC39C, TTLL1, TTLL7, TTPAL, TUBD1, TWNK, TXNL4A, TXNL4B, TXNRD1, TYK2, U2AF1, UBA2, UBA52, UBAP2, UBE2D2, UBE2D3, UBE2E3, UBE2I, UBE2J2, UBE3A, UBL7, UBXN11, UBXN7, UGDH, UGGT1, UGP2, UMAD1, AC007161.3, UNC45A, UQCC1, URGCP-MRPS24, URGCP, USMG5, USP16, USP21, USP28, USP3, USP33, USP35, USP54, USP9Y, USPL1, UTP15, VARS2, VASH2, VAV3, VDAC1, VDAC2, VDR, VEZT, VGF, VIL1, VILL, VIPR1, VPS29, VPS37C, VPS8, VPS9D1, VRK2, VWA1, VWA5A, WARS, WASF1, WASHC5, WBP5, WDHD1, WDPCP, WDR37, WDR53, WDR6, WDR72, WDR74, WDR81, WDR86, WDYHV1, WFDC3, WHSC1, WIPF1, WSCD2, WWP2, XAGE1A, XAGE1B, XKR9, XPNPEP1, XRCC3, XRN2, XXYLT1, YIF1A, YIF1B, YIPF1, YIPF5, YPEL5, YWHAB, YWHAZ, YYJAP1, ZBTB1, ZBTB14, ZBTB18, ZBTB20, ZBTB21, ZBTB25, ZBTB33, ZBTB34, ZBTB38, ZBTB43, ZBTB49, ZBTB7B, ZBTB7C, ZBTB8OS, ZC3H11A, ZBED6, ZC3H13, ZCCHC17, ZCCHC7, ZDHHC11, ZDHHC13, ZEB2, ZFAND5, ZFAND6, ZFP1, ZFP62, ZFX ZFYVE16, ZFYVE19, ZFYVE20, ZFYVE27, ZHX2, AC016405.1, ZHX3, ZIK1, ZIM2, PEG3, ZKSCAN1, ZKSCAN3, ZKSCAN8, ZMAT3, ZMAT5, ZMIZ2, ZMYM6, ZMYND11, ZNF10, AC026786.1, ZNF133, ZNF146, ZNF16, ZNF177, ZNF18, ZNF200, ZNF202, ZNF211, ZNF219, ZNF226, ZNF227, ZNF23, AC010547.4, ZNF23, AC010547.9, ZNF239, ZNF248, ZNF25, ZNF253, ZNF254, ZNF254, AC092279.1, ZNF263, ZNF274, ZNF275, ZNF28, ZNF468, ZNF283, ZNF287, ZNF3, ZNF320, ZNF322, ZNF324B, ZNF331, ZNF334, ZNF34, ZNF350, ZNF385A, ZNF395, FBXO16, ZNF415, ZNF418, ZNF43, ZNF433-AS1, AC0008770.4, ZNF438, ZNF444, ZNF445, ZNF467, ZNF480, ZNF493, ZNF493, CTD-2561J22.3, ZNF502, ZNF507, ZNF512, AC074091.1, ZNF512, RP11-158I13.2, ZNF512B, ZNF512B, SAMD10, ZNF521, ZNF532, ZNF544, AC020915.5, ZNF544, CTD-3138B18.4, ZNF559, ZNF177, ZNF562, ZNF567, ZNF569, ZNF570, ZNF571-AS1, ZNF540, ZNF577, ZNF580, ZNF581, ZNF580, ZNF581, CCDC106, ZNF600, ZNF611, ZNF613, ZNF615, ZNF619, ZNF620, ZNF639, ZNF652, ZNF665, ZNF667, ZNF668, ZNF671, ZNF682, ZNF687, ZNF691, ZNF696, ZNF701, ZNF706, ZNF707, ZNF714, ZNF717, ZNF718, ZNF720, ZNF721, ZNF730, ZNF763, ZNF780B, AC005614.5, ZNF782, ZNF786, ZNF79, ZNF791, ZNF81, ZNF83, ZNF837, ZNF839, ZNF84, ZNF845, ZNF846, ZNF865, ZNF91, ZNF92, ZNHIT3, ZSCAN21, ZSCAN25, ZSCAN30, and ZSCAN32.

[0157] In some embodiments, the gene encoding a target sequence comprises the HTT gene. In some embodiments, the gene encoding a target sequence comprises the MYB gene. In some embodiments, the gene encoding a target sequence comprises the SMN2 gene. In some embodiments, the gene encoding a target sequence comprises the FOAM1 gene.

[0158] Exemplary genes that may be modulated by the compounds of Formula (I) described herein may also include, inter alia, AC005258.1, AC005943.1, AC007849.1, AC008770.2, AC010487.3, AC011477.4, AC012651.1, AC012531.3, AC034102.2, AC073896.4, AC104472.3, AL109811.3, AL133342.1, AL137782.1, AL157871.5, AF241726.2, AL355336.1, AL358113.1, AL360181.3, AL445423.2, AL691482.3, AP001267.5, RF01169, and RF02271.

[0159] The compounds described herein may further be used to modulate a sequence comprising a particular splice site sequence, e.g., an RNA sequence (e.g., a pre-mRNA sequence). In some embodiments, the splice site sequence comprises a 5′ splice site sequence. In some embodiments, the splice site sequence comprises a 3′ splice site sequence. Exemplary gene sequences and splice site sequences (e.g., 5′ splice site sequences) include AAAgcaaguu (SEQ ID NO: 1), AAAguaaaaa (SEQ ID NO: 2), AAAguaaaau (SEQ ID NO: 3), AAAguaaagu (SEQ ID NO: 4), AAAguaaaua (SEQ ID NO: 5), AAAguaaaug (SEQ ID NO: 6), AAAguaaauu (SEQ ID NO: 7), AAAguaacac (SEQ ID NO: 8), AAAguaacca (SEQ ID NO: 9), AAAguaacuu (SEQ ID NO: 10), AAAguaagaa (SEQ ID NO: 11), AAAguaagac (SEQ ID NO: 12), AAAguaagag (SEQ ID NO: 13), AAAguaagau (SEQ ID NO: 14), AAAguaagca (SEQ ID NO: 15), AAAguaagcc (SEQ ID NO: 16), AAAguaagcu (SEQ ID NO: 17), AAAguaagga (SEQ ID NO: 18), AAAguaaggg (SEQ ID NO: 19), AAAguaaggu (SEQ ID NO: 20), AAAguaagua (SEQ ID NO: 21), AAAguaaguc (SEQ ID NO: 22), AAAguaagug (SEQ ID NO: 23), AAAguaaguu (SEQ ID NO: 24), AAAguaaucu (SEQ ID NO: 25), AAAguaauua (SEQ ID NO: 26), AAAguacaaa (SEQ ID NO: 27), AAAguaccgg (SEQ ID NO: 28), AAAguacuag (SEQ ID NO: 29), AAAguacugg (SEQ ID NO: 30), AAAguacuuc (SEQ ID NO: 31), AAAguacuug (SEQ ID NO: 32), AAAguagcuu (SEQ ID NO: 33), AAAguaggag (SEQ ID NO: 34), AAAguaggau (SEQ ID NO: 35), AAAguagggg (SEQ ID NO: 36), AAAguaggua (SEQ ID NO: 37), AAAguaguaa (SEQ ID NO: 38), AAAguauauu (SEQ ID NO: 39), AAAguauccu (SEQ ID NO: 40), AAAguaucuc (SEQ ID NO: 41), AAAguaugga (SEQ ID NO: 42), AAAguaugua (SEQ ID NO: 43), AAAguaugug (SEQ ID NO: 44), AAAguauguu (SEQ ID NO: 45), AAAguauugg (SEQ ID NO: 46), AAAguauuuu (SEQ ID NO: 47), AAAgucagau (SEQ ID NO: 48), AAAgucugag (SEQ ID NO: 49), AAAgugaaua (SEQ ID NO: 50), AAAgugagaa (SEQ ID NO: 51), AAAgugagac (SEQ ID NO: 52), AAAgugagag (SEQ ID NO: 53), AAAgugagau (SEQ ID NO: 54), AAAgugagca (SEQ ID NO: 55), AAAgugagcu (SEQ ID NO: 56), AAAgugaggg (SEQ ID NO: 57), AAAgugagua (SEQ ID NO: 58), AAAgugaguc (SEQ ID NO: 59), AAAgugagug (SEQ ID NO: 60), AAAgugaguu (SEQ ID NO: 61), AAAgugcguc (SEQ ID NO: 62), AAAgugcuga (SEQ ID NO: 63), AAAguggguc (SEQ ID NO: 64), AAAguggguu (SEQ ID NO: 65), AAAgugguaa (SEQ ID NO: 66), AAAguguaug (SEQ ID NO: 67), AAAgugugug (SEQ ID NO: 68), AAAguguguu (SEQ ID NO: 69), AAAguuaagu (SEQ ID NO: 70), AAAguuacuu (SEQ ID NO: 71), AAAguuagug (SEQ ID NO: 72), AAAguuaugu (SEQ ID NO: 73), AAAguugagu (SEQ ID NO: 74), AAAguuugua (SEQ ID NO: 75), AACguaaaac (SEQ ID NO: 76), AACguaaagc (SEQ ID NO: 77), AACguaaagg (SEQ ID NO: 78), AACguaagca (SEQ ID NO: 79), AACguaaggg (SEQ ID NO: 80), AACguaaguc (SEQ ID NO: 81), AACguaagug (SEQ ID NO: 82), AACguaaugg (SEQ ID NO: 83), AACguaguga (SEQ ID NO: 84), AACguaugua (SEQ ID NO: 85), AACguauguu (SEQ ID NO: 86), AACgugagca (SEQ ID NO: 87), AACgugagga (SEQ ID NO: 88), AACgugauuu (SEQ ID NO: 89), AACgugggau (SEQ ID NO: 90), AACgugggua (SEQ ID NO: 91), AACguguguu (SEQ ID NO: 92), AACguuggua (SEQ ID NO: 93), AAGgcaaauu (SEQ ID NO: 94), AAGgcaagag (SEQ ID NO: 95), AAGgcaagau (SEQ ID NO: 96), AAGgcaagcc (SEQ ID NO: 97), AAGgcaagga (SEQ ID NO: 98), AAGgcaaggg (SEQ ID NO: 99), AAGgcaagug (SEQ ID NO: 100), AAGgcaaguu (SEQ ID NO: 101), AAGgcacugc (SEQ ID NO: 102), AAGgcagaaa (SEQ ID NO: 103), AAGgcaggau (SEQ ID NO: 104), AAGgcaggca (SEQ ID NO: 105), AAGgcaggga (SEQ ID NO: 106), AAGgcagggg (SEQ ID NO: 107), AAGgcaggua (SEQ ID NO: 108), AAGgcaggug (SEQ ID NO: 109), AAGgcaucuc (SEQ ID NO: 110), AAGgcaugcu (SEQ ID NO: 111), AAGgcaugga (SEQ ID NO: 112), AAGgcauguu (SEQ ID NO: 113), AAGgcauuau (SEQ ID NO: 114), AAGgcgagcu (SEQ ID NO: 115), AAGgcgaguc (SEQ ID NO: 116), AAGgcgaguu (SEQ ID NO: 117), AAGgcuagcc (SEQ ID NO: 118), AAGguaaaaa (SEQ ID NO: 119), AAGguaaaac (SEQ ID NO: 120), AAGguaaaag (SEQ ID NO: 121), AAGguaaaau (SEQ ID NO: 122), AAGguaaaca (SEQ ID NO: 123), AAGguaaacc (SEQ ID NO: 124), AAGguaaacu (SEQ ID NO: 125), AAGguaaaga (SEQ ID NO: 126), AAGguaaagc (SEQ ID NO: 127), AAGguaaagg (SEQ ID NO: 128), AAGguaaagu (SEQ ID NO: 129), AAGguaaaua (SEQ ID NO: 130), AAGguaaauc (SEQ ID NO: 131), AAGguaaaug (SEQ ID NO: 132), AAGguaaauu (SEQ ID NO: 133), AAGguaacaa (SEQ ID NO: 134), AAGguaacau (SEQ ID NO: 135), AAGguaaccc (SEQ ID NO: 136), AAGguaacua (SEQ ID NO: 137), AAGguaacuc (SEQ ID NO: 138), AAGguaacug (SEQ ID NO: 139), AAGguaacuu (SEQ ID NO: 140), AAGguaagaa (SEQ ID NO: 141), AAGguaagac (SEQ ID NO: 142), AAGguaagag (SEQ ID NO: 143), AAGguaagau (SEQ ID NO: 144), AAGguaagca (SEQ ID NO: 145), AAGguaagcc (SEQ ID NO: 146), AAGguaagcg (SEQ ID NO: 147), AAGguaagcu (SEQ ID NO: 148), AAGguaagga (SEQ ID NO: 149), AAGguaaggc (SEQ ID NO: 150), AAGguaaggg (SEQ ID NO: 151), AAGguaaggu (SEQ ID NO: 152), AAGguaagua (SEQ ID NO: 153), AAGguaaguc (SEQ ID NO: 154), AAGguaagug (SEQ ID NO: 155), AAGguaaguu (SEQ ID NO: 156), AAGguaauaa (SEQ ID NO: 157), AAGguaauac (SEQ ID NO: 158), AAGguaauag (SEQ ID NO: 159), AAGguaauau (SEQ ID NO: 160), AAGguaauca (SEQ ID NO: 161), AAGguaaucc (SEQ ID NO: 162), AAGguaaucu (SEQ ID NO: 163), AAGguaauga (SEQ ID NO: 164), AAGguaaugc (SEQ ID NO: 165), AAGguaaugg (SEQ ID NO: 166), AAGguaaugu (SEQ ID NO: 167), AAGguaauua (SEQ ID NO: 168), AAGguaauuc (SEQ ID NO: 169), AAGguaauug (SEQ ID NO: 170), AAGguaauuu (SEQ ID NO: 171), AAGguacaaa (SEQ ID NO: 172), AAGguacaag (SEQ ID NO: 173), AAGguacaau (SEQ ID NO: 174), AAGguacacc (SEQ ID NO: 175), AAGguacacu (SEQ ID NO: 176), AAGguacagg (SEQ ID NO: 177), AAGguacagu (SEQ ID NO: 178), AAGguacaua (SEQ ID NO: 179), AAGguacaug (SEQ ID NO: 180), AAGguacauu (SEQ ID NO: 181), AAGguaccaa (SEQ ID NO: 182), AAGguaccag (SEQ ID NO: 183), AAGguaccca (SEQ ID NO: 184), AAGguacccu (SEQ ID NO: 185), AAGguaccuc (SEQ ID NO: 186), AAGguaccug (SEQ ID NO: 187), AAGguaccuu (SEQ ID NO: 188), AAGguacgaa (SEQ ID NO: 189), AAGguacggg (SEQ ID NO: 190), AAGguacggu (SEQ ID NO: 191), AAGguacguc (SEQ ID NO: 192), AAGguacguu (SEQ ID NO: 193), AAGguacuaa (SEQ ID NO: 194), AAGguacuau (SEQ ID NO: 195), AAGguacucu (SEQ ID NO: 196), AAGguacuga (SEQ ID NO: 197), AAGguacugc (SEQ ID NO: 198), AAGguacugu (SEQ ID NO: 199), AAGguacuuc (SEQ ID NO: 200), AAGguacuug (SEQ ID NO: 201), AAGguacuuu (SEQ ID NO: 202), AAGguagaaa (SEQ ID NO: 203), AAGguagaac (SEQ ID NO: 204), AAGguagaca (SEQ ID NO: 205), AAGguagacc (SEQ ID NO: 206), AAGguagacu (SEQ ID NO: 207), AAGguagagu (SEQ ID NO: 208), AAGguagaua (SEQ ID NO: 209), AAGguagcaa (SEQ ID NO: 210), AAGguagcag (SEQ ID NO: 211), AAGguagcca (SEQ ID NO: 212), AAGguagccu (SEQ ID NO: 213), AAGguagcua (SEQ ID NO: 214), AAGguagcug (SEQ ID NO: 215), AAGguagcuu (SEQ ID NO: 216), AAGguaggaa (SEQ ID NO: 217), AAGguaggag (SEQ ID NO: 218), AAGguaggau (SEQ ID NO: 219), AAGguaggca (SEQ ID NO: 220), AAGguaggcc (SEQ ID NO: 221), AAGguaggcu (SEQ ID NO: 222), AAGguaggga (SEQ ID NO: 223), AAGguagggc (SEQ ID NO: 224), AAGguagggg (SEQ ID NO: 225), AAGguagggu (SEQ ID NO: 226), AAGguaggua (SEQ ID NO: 227), AAGguagguc (SEQ ID NO: 228), AAGguaggug (SEQ ID NO: 229), AAGguagguu (SEQ ID NO: 230), AAGguaguaa (SEQ ID NO: 231), AAGguaguag (SEQ ID NO: 232), AAGguagucu (SEQ ID NO: 233), AAGguagugc (SEQ ID NO: 234), AAGguagugg (SEQ ID NO: 235), AAGguaguuc (SEQ ID NO: 236), AAGguaguuu (SEQ ID NO: 237), AAGguauaaa (SEQ ID NO: 238), AAGguauaau (SEQ ID NO: 239), AAGguauaca (SEQ ID NO: 240), AAGguauacu (SEQ ID NO: 241), AAGguauaua (SEQ ID NO: 242), AAGguauauc (SEQ ID NO: 243), AAGguauaug (SEQ ID NO: 244), AAGguauauu (SEQ ID NO: 245), AAGguaucac (SEQ ID NO: 246), AAGguaucag (SEQ ID NO: 247), AAGguauccc (SEQ ID NO: 248), AAGguauccu (SEQ ID NO: 249), AAGguaucuc (SEQ ID NO: 250), AAGguaucug (SEQ ID NO: 251), AAGguaucuu (SEQ ID NO: 252), AAGguaugaa (SEQ ID NO: 253), AAGguaugac (SEQ ID NO: 254), AAGguaugag (SEQ ID NO: 255), AAGguaugau (SEQ ID NO: 256), AAGguaugca (SEQ ID NO: 257), AAGguaugcc (SEQ ID NO: 258), AAGguaugcu (SEQ ID NO: 259), AAGguaugga (SEQ ID NO: 260), AAGguauggc (SEQ ID NO: 261), AAGguauggg (SEQ ID NO: 262), AAGguaugua (SEQ ID NO: 263), AAGguauguc (SEQ ID NO: 264), AAGguaugug (SEQ ID NO: 265), AAGguauguu (SEQ ID NO: 266), AAGguauuaa (SEQ ID NO: 267), AAGguauuac (SEQ ID NO: 268), AAGguauuag (SEQ ID NO: 269), AAGguauuau (SEQ ID NO: 270), AAGguauucc (SEQ ID NO: 271), AAGguauuga (SEQ ID NO: 272), AAGguauugu (SEQ ID NO: 273), AAGguauuua (SEQ ID NO: 274), AAGguauuuc (SEQ ID NO: 275), AAGguauuug (SEQ ID NO: 276), AAGguauuuu (SEQ ID NO: 277), AAGgucaaau (SEQ ID NO: 278), AAGgucaaga (SEQ ID NO: 279), AAGgucaagu (SEQ ID NO: 280), AAGgucacag (SEQ ID NO: 281), AAGgucagaa (SEQ ID NO: 282), AAGgucagac (SEQ ID NO: 283), AAGgucagag (SEQ ID NO: 284), AAGgucagca (SEQ ID NO: 285), AAGgucagcc (SEQ ID NO: 286), AAGgucagcg (SEQ ID NO: 287), AAGgucagcu (SEQ ID NO: 288), AAGgucagga (SEQ ID NO: 289), AAGgucaggc (SEQ ID NO: 290), AAGgucaggg (SEQ ID NO: 291), AAGgucaggu (SEQ ID NO: 292), AAGgucagua (SEQ ID NO: 293), AAGgucaguc (SEQ ID NO: 294), AAGgucagug (SEQ ID NO: 295), AAGgucaguu (SEQ ID NO: 296), AAGgucauag (SEQ ID NO: 297), AAGgucaucu (SEQ ID NO: 298), AAGguccaca (SEQ ID NO: 299), AAGguccaga (SEQ ID NO: 300), AAGguccaua (SEQ ID NO: 301), AAGgucccag (SEQ ID NO: 302), AAGgucccuc (SEQ ID NO: 303), AAGguccuuc (SEQ ID NO: 304), AAGgucgagg (SEQ ID NO: 305), AAGgucuaau (SEQ ID NO: 306), AAGgucuacc (SEQ ID NO: 307), AAGgucuaua (SEQ ID NO: 308), AAGgucuccu (SEQ ID NO: 309), AAGgucucug (SEQ ID NO: 310), AAGgucucuu (SEQ ID NO: 311), AAGgucugaa (SEQ ID NO: 312), AAGgucugag (SEQ ID NO: 313), AAGgucugga (SEQ ID NO: 314), AAGgucuggg (SEQ ID NO: 315), AAGgucugua (SEQ ID NO: 316), AAGgucuguu (SEQ ID NO: 317), AAGgucuucu (SEQ ID NO: 318), AAGgucuuuu (SEQ ID NO: 319), AAGgugaaac (SEQ ID NO: 320), AAGgugaaag (SEQ ID NO: 321), AAGgugaaau (SEQ ID NO: 322), AAGgugaacu (SEQ ID NO: 323), AAGgugaagc (SEQ ID NO: 324), AAGgugaagg (SEQ ID NO: 325), AAGgugaagu (SEQ ID NO: 326), AAGgugaaua (SEQ ID NO: 327), AAGgugaaug (SEQ ID NO: 328), AAGgugaauu (SEQ ID NO: 329), AAGgugacaa (SEQ ID NO: 330), AAGgugacag (SEQ ID NO: 331), AAGgugacau (SEQ ID NO: 332), AAGgugacug (SEQ ID NO: 333), AAGgugacuu (SEQ ID NO: 334), AAGgugagaa (SEQ ID NO: 335), AAGgugagac (SEQ ID NO: 336), AAGgugagag (SEQ ID NO: 337), AAGgugagau (SEQ ID NO: 338), AAGgugagca (SEQ ID NO: 339), AAGgugagcc (SEQ ID NO: 340), AAGgugagcg (SEQ ID NO: 341), AAGgugagcu (SEQ ID NO: 342), AAGgugagga (SEQ ID NO: 343), AAGgugaggc (SEQ ID NO: 344), AAGgugaggg (SEQ ID NO: 345), AAGgugaggu (SEQ ID NO: 346), AAGgugagua (SEQ ID NO: 347), AAGgugaguc (SEQ ID NO: 348), AAGgugagug (SEQ ID NO: 349), AAGgugaguu (SEQ ID NO: 350), AAGgugauaa (SEQ ID NO: 351), AAGgugauca (SEQ ID NO: 352), AAGgugaucc (SEQ ID NO: 353), AAGgugauga (SEQ ID NO: 354), AAGgugaugc (SEQ ID NO: 355), AAGgugaugu (SEQ ID NO: 356), AAGgugauua (SEQ ID NO: 357), AAGgugauug (SEQ ID NO: 358), AAGgugauuu (SEQ ID NO: 359), AAGgugcaca (SEQ ID NO: 360), AAGgugcauc (SEQ ID NO: 361), AAGgugcccu (SEQ ID NO: 362), AAGgugccug (SEQ ID NO: 363), AAGgugcgug (SEQ ID NO: 364), AAGgugcguu (SEQ ID NO: 365), AAGgugcucc (SEQ ID NO: 366), AAGgugcuga (SEQ ID NO: 367), AAGgugcugc (SEQ ID NO: 368), AAGgugcugg (SEQ ID NO: 369), AAGgugcuua (SEQ ID NO: 370), AAGgugcuuu (SEQ ID NO: 371), AAGguggaua (SEQ ID NO: 372), AAGguggcua (SEQ ID NO: 373), AAGguggcug (SEQ ID NO: 374), AAGguggcuu (SEQ ID NO: 375), AAGgugggaa (SEQ ID NO: 376), AAGgugggag (SEQ ID NO: 377), AAGgugggau (SEQ ID NO: 378), AAGgugggca (SEQ ID NO: 379), AAGgugggcc (SEQ ID NO: 380), AAGgugggcg (SEQ ID NO: 381), AAGgugggga (SEQ ID NO: 382), AAGguggggu (SEQ ID NO: 383), AAGgugggua (SEQ ID NO: 384), AAGgugggug (SEQ ID NO: 385), AAGguggguu (SEQ ID NO: 386), AAGgugguaa (SEQ ID NO: 387), AAGgugguac (SEQ ID NO: 388), AAGgugguau (SEQ ID NO: 389), AAGguggugg (SEQ ID NO: 390), AAGgugguua (SEQ ID NO: 391), AAGgugguuc (SEQ ID NO: 392), AAGgugguuu (SEQ ID NO: 393), AAGguguaag (SEQ ID NO: 394), AAGgugucaa (SEQ ID NO: 395), AAGgugucag (SEQ ID NO: 396), AAGgugucug (SEQ ID NO: 397), AAGgugugaa (SEQ ID NO: 398), AAGgugugag (SEQ ID NO: 399), AAGgugugca (SEQ ID NO: 400), AAGgugugga (SEQ ID NO: 401), AAGguguggu (SEQ ID NO: 402), AAGgugugua (SEQ ID NO: 403), AAGguguguc (SEQ ID NO: 404), AAGgugugug (SEQ ID NO: 405), AAGguguguu (SEQ ID NO: 406), AAGguguucu (SEQ ID NO: 407), AAGguguugc (SEQ ID NO: 408), AAGguguugg (SEQ ID NO: 409), AAGguguuug (SEQ ID NO: 410), AAGguuaaaa (SEQ ID NO: 411), AAGguuaaca (SEQ ID NO: 412), AAGguuaagc (SEQ ID NO: 413), AAGguuaauu (SEQ ID NO: 414), AAGguuacau (SEQ ID NO: 415), AAGguuagaa (SEQ ID NO: 416), AAGguuagau (SEQ ID NO: 417), AAGguuagca (SEQ ID NO: 418), AAGguuagcc (SEQ ID NO: 419), AAGguuagga (SEQ ID NO: 420), AAGguuaggc (SEQ ID NO: 421), AAGguuagua (SEQ ID NO: 422), AAGguuaguc (SEQ ID NO: 423), AAGguuagug (SEQ ID NO: 424), AAGguuaguu (SEQ ID NO: 425), AAGguuauag (SEQ ID NO: 426), AAGguuauga (SEQ ID NO: 427), AAGguucaaa (SEQ ID NO: 428), AAGguucaag (SEQ ID NO: 429), AAGguuccuu (SEQ ID NO: 430), AAGguucggc (SEQ ID NO: 431), AAGguucguu (SEQ ID NO: 432), AAGguucuaa (SEQ ID NO: 433), AAGguucuga (SEQ ID NO: 434), AAGguucuua (SEQ ID NO: 435), AAGguugaau (SEQ ID NO: 436), AAGguugacu (SEQ ID NO: 437), AAGguugagg (SEQ ID NO: 438), AAGguugagu (SEQ ID NO: 439), AAGguugaua (SEQ ID NO: 440), AAGguugcac (SEQ ID NO: 441), AAGguugcug (SEQ ID NO: 442), AAGguuggaa (SEQ ID NO: 443), AAGguuggca (SEQ ID NO: 444), AAGguuggga (SEQ ID NO: 445), AAGguugggg (SEQ ID NO: 446), AAGguuggua (SEQ ID NO: 447), AAGguugguc (SEQ ID NO: 448), AAGguuggug (SEQ ID NO: 449), AAGguugguu (SEQ ID NO: 450), AAGguuguaa (SEQ ID NO: 451), AAGguugucc (SEQ ID NO: 452), AAGguugugc (SEQ ID NO: 453), AAGguuguua (SEQ ID NO: 454), AAGguuuacc (SEQ ID NO: 455), AAGguuuaua (SEQ ID NO: 456), AAGguuuauu (SEQ ID NO: 457), AAGguuuccu (SEQ ID NO: 458), AAGguuucgu (SEQ ID NO: 459), AAGguuugag (SEQ ID NO: 460), AAGguuugca (SEQ ID NO: 461), AAGguuugcc (SEQ ID NO: 462), AAGguuugcu (SEQ ID NO: 463), AAGguuugga (SEQ ID NO: 464), AAGguuuggu (SEQ ID NO: 465), AAGguuugua (SEQ ID NO: 466), AAGguuuguc (SEQ ID NO: 467), AAGguuugug (SEQ ID NO: 468), AAGguuuuaa (SEQ ID NO: 469), AAGguuuuca (SEQ ID NO: 470), AAGguuuucg (SEQ ID NO: 471), AAGguuuugc (SEQ ID NO: 472), AAGguuuugu (SEQ ID NO: 473), AAGguuuuuu (SEQ ID NO: 474), AAUgcaagua (SEQ ID NO: 475), AAUgcaaguc (SEQ ID NO: 476), AAUguaaaca (SEQ ID NO: 477), AAUguaaaua (SEQ ID NO: 478), AAUguaaauc (SEQ ID NO: 479), AAUguaaaug (SEQ ID NO: 480), AAUguaaauu (SEQ ID NO: 481), AAUguaacua (SEQ ID NO: 482), AAUguaagaa (SEQ ID NO: 483), AAUguaagag (SEQ ID NO: 484), AAUguaagau (SEQ ID NO: 485), AAUguaagcc (SEQ ID NO: 486), AAUguaagcu (SEQ ID NO: 487), AAUguaagga (SEQ ID NO: 488), AAUguaagua (SEQ ID NO: 489), AAUguaaguc (SEQ ID NO: 490), AAUguaagug (SEQ ID NO: 491), AAUguaaguu (SEQ ID NO: 492), AAUguaauca (SEQ ID NO: 493), AAUguaauga (SEQ ID NO: 494), AAUguaaugu (SEQ ID NO: 495), AAUguacauc (SEQ ID NO: 496), AAUguacaug (SEQ ID NO: 497), AAUguacgau (SEQ ID NO: 498), AAUguacgua (SEQ ID NO: 499), AAUguacguc (SEQ ID NO: 500), AAUguacgug (SEQ ID NO: 501), AAUguacucu (SEQ ID NO: 502), AAUguaggca (SEQ ID NO: 503), AAUguagguu (SEQ ID NO: 504), AAUguaucua (SEQ ID NO: 505), AAUguaugaa (SEQ ID NO: 506), AAUguaugua (SEQ ID NO: 507), AAUguaugug (SEQ ID NO: 508), AAUguauguu (SEQ ID NO: 509), AAUgucagag (SEQ ID NO: 510), AAUgucagau (SEQ ID NO: 511), AAUgucagcu (SEQ ID NO: 512), AAUgucagua (SEQ ID NO: 513), AAUgucaguc (SEQ ID NO: 514), AAUgucagug (SEQ ID NO: 515), AAUgucaguu (SEQ ID NO: 516), AAUgucggua (SEQ ID NO: 517), AAUgucuguu (SEQ ID NO: 518), AAUgugagaa (SEQ ID NO: 519), AAUgugagca (SEQ ID NO: 520), AAUgugagcc (SEQ ID NO: 521), AAUgugagga (SEQ ID NO: 522), AAUgugagua (SEQ ID NO: 523), AAUgugaguc (SEQ ID NO: 524), AAUgugagug (SEQ ID NO: 525), AAUgugaguu (SEQ ID NO: 526), AAUgugauau (SEQ ID NO: 527), AAUgugcaua (SEQ ID NO: 528), AAUgugcgua (SEQ ID NO: 529), AAUgugcguc (SEQ ID NO: 530), AAUgugggac (SEQ ID NO: 531), AAUguggguc (SEQ ID NO: 532), AAUgugggug (SEQ ID NO: 533), AAUgugguuu (SEQ ID NO: 534), AAUgugugua (SEQ ID NO: 535), AAUguuaagu (SEQ ID NO: 536), AAUguuagaa (SEQ ID NO: 537), AAUguuagau (SEQ ID NO: 538), AAUguuagua (SEQ ID NO: 539), AAUguuggug (SEQ ID NO: 540), ACAgcaagua (SEQ ID NO: 541), ACAguaaaua (SEQ ID NO: 542), ACAguaaaug (SEQ ID NO: 543), ACAguaagaa (SEQ ID NO: 544), ACAguaagca (SEQ ID NO: 545), ACAguaagua (SEQ ID NO: 546), ACAguaaguc (SEQ ID NO: 547), ACAguaagug (SEQ ID NO: 548), ACAguaaguu (SEQ ID NO: 549), ACAguacgua (SEQ ID NO: 550), ACAguaggug (SEQ ID NO: 551), ACAguauaac (SEQ ID NO: 552), ACAguaugua (SEQ ID NO: 553), ACAgucaguu (SEQ ID NO: 554), ACAgugagaa (SEQ ID NO: 555), ACAgugagcc (SEQ ID NO: 556), ACAgugagcu (SEQ ID NO: 557), ACAgugagga (SEQ ID NO: 558), ACAgugaggu (SEQ ID NO: 559), ACAgugagua (SEQ ID NO: 560), ACAgugaguc (SEQ ID NO: 561), ACAgugagug (SEQ ID NO: 562), ACAgugaguu (SEQ ID NO: 563), ACAgugggua (SEQ ID NO: 564), ACAguggguu (SEQ ID NO: 565), ACAguguaaa (SEQ ID NO: 566), ACAguuaagc (SEQ ID NO: 567), ACAguuaagu (SEQ ID NO: 568), ACAguuaugu (SEQ ID NO: 569), ACAguugagu (SEQ ID NO: 570), ACAguuguga (SEQ ID NO: 571), ACCguaagua (SEQ ID NO: 572), ACCgugagaa (SEQ ID NO: 573), ACCgugagca (SEQ ID NO: 574), ACCgugaguu (SEQ ID NO: 575), ACCgugggug (SEQ ID NO: 576), ACGguaaaac (SEQ ID NO: 577), ACGguaacua (SEQ ID NO: 578), ACGguaagua (SEQ ID NO: 579), ACGguaagug (SEQ ID NO: 580), ACGguaaguu (SEQ ID NO: 581), ACGguaauua (SEQ ID NO: 582), ACGguaauuu (SEQ ID NO: 583), ACGguacaau (SEQ ID NO: 584), ACGguacagu (SEQ ID NO: 585), ACGguaccag (SEQ ID NO: 586), ACGguacggu (SEQ ID NO: 587), ACGguacgua (SEQ ID NO: 588), ACGguaggaa (SEQ ID NO: 589), ACGguaggag (SEQ ID NO: 590), ACGguaggug (SEQ ID NO: 591), ACGguaguaa (SEQ ID NO: 592), ACGguauaau (SEQ ID NO: 593), ACGguaugac (SEQ ID NO: 594), ACGguaugcg (SEQ ID NO: 595), ACGguaugua (SEQ ID NO: 596), ACGguauguc (SEQ ID NO: 597), ACGgugaaac (SEQ ID NO: 598), ACGgugaagu (SEQ ID NO: 599), ACGgugaauc (SEQ ID NO: 600), ACGgugacag (SEQ ID NO: 601), ACGgugacca (SEQ ID NO: 602), ACGgugagaa (SEQ ID NO: 603), ACGgugagau (SEQ ID NO: 604), ACGgugagcc (SEQ ID NO: 605), ACGgugagua (SEQ ID NO: 606), ACGgugagug (SEQ ID NO: 607), ACGgugaguu (SEQ ID NO: 608), ACGgugcgug (SEQ ID NO: 609), ACGguggcac (SEQ ID NO: 610), ACGguggggc (SEQ ID NO: 611), ACGgugggug (SEQ ID NO: 612), ACGguguagu (SEQ ID NO: 613), ACGgugucac (SEQ ID NO: 614), ACGgugugua (SEQ ID NO: 615), ACGguguguu (SEQ ID NO: 616), ACGguuagug (SEQ ID NO: 617), ACGguuaguu (SEQ ID NO: 618), ACGguucaau (SEQ ID NO: 619), ACUguaaaua (SEQ ID NO: 620), ACUguaagaa (SEQ ID NO: 621), ACUguaagac (SEQ ID NO: 622), ACUguaagca (SEQ ID NO: 623), ACUguaagcu (SEQ ID NO: 624), ACUguaagua (SEQ ID NO: 625), ACUguaaguc (SEQ ID NO: 626), ACUguaaguu (SEQ ID NO: 627), ACUguacguu (SEQ ID NO: 628), ACUguacuge (SEQ ID NO: 629), ACUguaggcu (SEQ ID NO: 630), ACUguaggua (SEQ ID NO: 631), ACUguauauu (SEQ ID NO: 632), ACUguaugaa (SEQ ID NO: 633), ACUguaugcu (SEQ ID NO: 634), ACUguaugug (SEQ ID NO: 635), ACUguauucc (SEQ ID NO: 636), ACUgucagcu (SEQ ID NO: 637), ACUgucagug (SEQ ID NO: 638), ACUgugaacg (SEQ ID NO: 639), ACUgugagca (SEQ ID NO: 640), ACUgugagcg (SEQ ID NO: 641), ACUgugagcu (SEQ ID NO: 642), ACUgugagua (SEQ ID NO: 643), ACUgugaguc (SEQ ID NO: 644), ACUgugagug (SEQ ID NO: 645), ACUgugaguu (SEQ ID NO: 646), ACUgugggua (SEQ ID NO: 647), ACUgugugug (SEQ ID NO: 648), ACUguuaagu (SEQ ID NO: 649), AGAgcaagua (SEQ ID NO: 650), AGAguaaaac (SEQ ID NO: 651), AGAguaaacg (SEQ ID NO: 652), AGAguaaaga (SEQ ID NO: 653), AGAguaaagu (SEQ ID NO: 654), AGAguaaauc (SEQ ID NO: 655), AGAguaaaug (SEQ ID NO: 656), AGAguaacau (SEQ ID NO: 657), AGAguaacua (SEQ ID NO: 658), AGAguaagaa (SEQ ID NO: 659), AGAguaagac (SEQ ID NO: 660), AGAguaagag (SEQ ID NO: 661), AGAguaagau (SEQ ID NO: 662), AGAguaagca (SEQ ID NO: 663), AGAguaagcu (SEQ ID NO: 664), AGAguaagga (SEQ ID NO: 665), AGAguaaggc (SEQ ID NO: 666), AGAguaaggg (SEQ ID NO: 667), AGAguaaggu (SEQ ID NO: 668), AGAguaaguc (SEQ ID NO: 669), AGAguaagug (SEQ ID NO: 670), AGAguaaguu (SEQ ID NO: 671), AGAguaauaa (SEQ ID NO: 672), AGAguaaugu (SEQ ID NO: 673), AGAguaauuc (SEQ ID NO: 674), AGAguaauuu (SEQ ID NO: 675), AGAguacacc (SEQ ID NO: 676), AGAguaccug (SEQ ID NO: 677), AGAguacgug (SEQ ID NO: 678), AGAguacucu (SEQ ID NO: 679), AGAguacuga (SEQ ID NO: 680), AGAguacuuu (SEQ ID NO: 681), AGAguagcug (SEQ ID NO: 682), AGAguaggaa (SEQ ID NO: 683), AGAguaggga (SEQ ID NO: 684), AGAguagggu (SEQ ID NO: 685), AGAguagguc (SEQ ID NO: 686), AGAguaggug (SEQ ID NO: 687), AGAguagguu (SEQ ID NO: 688), AGAguauaua (SEQ ID NO: 689), AGAguauauu (SEQ ID NO: 690), AGAguaugaa (SEQ ID NO: 691), AGAguaugac (SEQ ID NO: 692), AGAguaugau (SEQ ID NO: 693), AGAguauguc (SEQ ID NO: 694), AGAguaugug (SEQ ID NO: 695), AGAguauguu (SEQ ID NO: 696), AGAguauuaa (SEQ ID NO: 697), AGAguauuau (SEQ ID NO: 698), AGAgucagug (SEQ ID NO: 699), AGAgugagac (SEQ ID NO: 700), AGAgugagag (SEQ ID NO: 701), AGAgugagau (SEQ ID NO: 702), AGAgugagca (SEQ ID NO: 703), AGAgugagua (SEQ ID NO: 704), AGAgugaguc (SEQ ID NO: 705), AGAgugagug (SEQ ID NO: 706), AGAgugaguu (SEQ ID NO: 707), AGAgugcguc (SEQ ID NO: 708), AGAgugggga (SEQ ID NO: 709), AGAgugggug (SEQ ID NO: 710), AGAgugugug (SEQ ID NO: 711), AGAguguuuc (SEQ ID NO: 712), AGAguuagua (SEQ ID NO: 713), AGAguugaga (SEQ ID NO: 714), AGAguugagu (SEQ ID NO: 715), AGAguugguu (SEQ ID NO: 716), AGAguuugau (SEQ ID NO: 717), AGCguaagcu (SEQ ID NO: 718), AGCguaagug (SEQ ID NO: 719), AGCgugagcc (SEQ ID NO: 720), AGCgugagug (SEQ ID NO: 721), AGCguuguuc (SEQ ID NO: 722), AGGgcagagu (SEQ ID NO: 723), AGGgcagccu (SEQ ID NO: 724), AGGgcuagua (SEQ ID NO: 725), AGGguaaaga (SEQ ID NO: 726), AGGguaaaua (SEQ ID NO: 727), AGGguaaauc (SEQ ID NO: 728), AGGguaaauu (SEQ ID NO: 729), AGGguaacca (SEQ ID NO: 730), AGGguaacug (SEQ ID NO: 731), AGGguaacuu (SEQ ID NO: 732), AGGguaagaa (SEQ ID NO: 733), AGGguaagag (SEQ ID NO: 734), AGGguaagau (SEQ ID NO: 735), AGGguaagca (SEQ ID NO: 736), AGGguaagga (SEQ ID NO: 737), AGGguaaggc (SEQ ID NO: 738), AGGguaaggg (SEQ ID NO: 739), AGGguaagua (SEQ ID NO: 740), AGGguaaguc (SEQ ID NO: 741), AGGguaagug (SEQ ID NO: 742), AGGguaaguu (SEQ ID NO: 743), AGGguaauac (SEQ ID NO: 744), AGGguaauga (SEQ ID NO: 745), AGGguaauua (SEQ ID NO: 746), AGGguaauuu (SEQ ID NO: 747), AGGguacacc (SEQ ID NO: 748), AGGguacagu (SEQ ID NO: 749), AGGguacggu (SEQ ID NO: 750), AGGguaggac (SEQ ID NO: 751), AGGguaggag (SEQ ID NO: 752), AGGguaggca (SEQ ID NO: 753), AGGguaggcc (SEQ ID NO: 754), AGGguaggga (SEQ ID NO: 755), AGGguagggu (SEQ ID NO: 756), AGGguagguc (SEQ ID NO: 757), AGGguaggug (SEQ ID NO: 758), AGGguagguu (SEQ ID NO: 759), AGGguauaua (SEQ ID NO: 760), AGGguaugac (SEQ ID NO: 761), AGGguaugag (SEQ ID NO: 762), AGGguaugau (SEQ ID NO: 763), AGGguaugca (SEQ ID NO: 764), AGGguaugcu (SEQ ID NO: 765), AGGguauggg (SEQ ID NO: 766), AGGguauggu (SEQ ID NO: 767), AGGguaugua (SEQ ID NO: 768), AGGguauguc (SEQ ID NO: 769), AGGguaugug (SEQ ID NO: 770), AGGguauuac (SEQ ID NO: 771), AGGguauucu (SEQ ID NO: 772), AGGguauuuc (SEQ ID NO: 773), AGGgucagag (SEQ ID NO: 774), AGGgucagca (SEQ ID NO: 775), AGGgucagga (SEQ ID NO: 776), AGGgucaggg (SEQ ID NO: 777), AGGgucagug (SEQ ID NO: 778), AGGgucaguu (SEQ ID NO: 779), AGGguccccu (SEQ ID NO: 780), AGGgucggga (SEQ ID NO: 781), AGGgucugca (SEQ ID NO: 782), AGGgucuguu (SEQ ID NO: 783), AGGgugaaga (SEQ ID NO: 784), AGGgugacua (SEQ ID NO: 785), AGGgugagaa (SEQ ID NO: 786), AGGgugagac (SEQ ID NO: 787), AGGgugagag (SEQ ID NO: 788), AGGgugagca (SEQ ID NO: 789), AGGgugagcc (SEQ ID NO: 790), AGGgugagcu (SEQ ID NO: 791), AGGgugagga (SEQ ID NO: 792), AGGgugaggg (SEQ ID NO: 793), AGGgugaggu (SEQ ID NO: 794), AGGgugagua (SEQ ID NO: 795), AGGgugaguc (SEQ ID NO: 796), AGGgugagug (SEQ ID NO: 797), AGGgugaguu (SEQ ID NO: 798), AGGgugggga (SEQ ID NO: 799), AGGguggggu (SEQ ID NO: 800), AGGgugggua (SEQ ID NO: 801), AGGgugggug (SEQ ID NO: 802), AGGgugugua (SEQ ID NO: 803), AGGgugugug (SEQ ID NO: 804), AGGguuaaug (SEQ ID NO: 805), AGGguuagaa (SEQ ID NO: 806), AGGguuaguu (SEQ ID NO: 807), AGGguuggug (SEQ ID NO: 808), AGGguuugug (SEQ ID NO: 809), AGGguuuguu (SEQ ID NO: 810), AGUguaaaag (SEQ ID NO: 811), AGUguaaaua (SEQ ID NO: 812), AGUguaaauu (SEQ ID NO: 813), AGUguaagaa (SEQ ID NO: 814), AGUguaagag (SEQ ID NO: 815), AGUguaagau (SEQ ID NO: 816), AGUguaagca (SEQ ID NO: 817), AGUguaagcc (SEQ ID NO: 818), AGUguaagua (SEQ ID NO: 819), AGUguaagug (SEQ ID NO: 820), AGUguaaguu (SEQ ID NO: 821), AGUguaauug (SEQ ID NO: 822), AGUguaggac (SEQ ID NO: 823), AGUguagguc (SEQ ID NO: 824), AGUguaugag (SEQ ID NO: 825), AGUguaugua (SEQ ID NO: 826), AGUguauguu (SEQ ID NO: 827), AGUguauugu (SEQ ID NO: 828), AGUguauuua (SEQ ID NO: 829), AGUgucaguc (SEQ ID NO: 830), AGUgugagag (SEQ ID NO: 831), AGUgugagca (SEQ ID NO: 832), AGUgugagcc (SEQ ID NO: 833), AGUgugagcu (SEQ ID NO: 834), AGUgugagua (SEQ ID NO: 835), AGUgugaguc (SEQ ID NO: 836), AGUgugagug (SEQ ID NO: 837), AGUgugaguu (SEQ ID NO: 838), AGUgugggua (SEQ ID NO: 839), AGUgugggug (SEQ ID NO: 840), AGUgugugua (SEQ ID NO: 841), AGUguuccua (SEQ ID NO: 842), AGUguugggg (SEQ ID NO: 843), AGUguuucag (SEQ ID NO: 844), AUAguaaaua (SEQ ID NO: 845), AUAguaagac (SEQ ID NO: 846), AUAguaagau (SEQ ID NO: 847), AUAguaagca (SEQ ID NO: 848), AUAguaagua (SEQ ID NO: 849), AUAguaagug (SEQ ID NO: 850), AUAguaaguu (SEQ ID NO: 851), AUAguaggua (SEQ ID NO: 852), AUAguauguu (SEQ ID NO: 853), AUAgucucac (SEQ ID NO: 854), AUAgugagac (SEQ ID NO: 855), AUAgugagag (SEQ ID NO: 856), AUAgugagau (SEQ ID NO: 857), AUAgugagcc (SEQ ID NO: 858), AUAgugaggc (SEQ ID NO: 859), AUAgugagua (SEQ ID NO: 860), AUAgugaguc (SEQ ID NO: 861), AUAgugagug (SEQ ID NO: 862), AUAgugcguc (SEQ ID NO: 863), AUAgugugua (SEQ ID NO: 864), AUAguucagu (SEQ ID NO: 865), AUCguaagcc (SEQ ID NO: 866), AUCguaaguu (SEQ ID NO: 867), AUCguauucc (SEQ ID NO: 868), AUCgugagua (SEQ ID NO: 869), AUGgcaagcg (SEQ ID NO: 870), AUGgcaagga (SEQ ID NO: 871), AUGgcaaguu (SEQ ID NO: 872), AUGgcaggua (SEQ ID NO: 873), AUGgcaugug (SEQ ID NO: 874), AUGgcgccau (SEQ ID NO: 875), AUGgcuugug (SEQ ID NO: 876), AUGguaaaac (SEQ ID NO: 877), AUGguaaaau (SEQ ID NO: 878), AUGguaaacc (SEQ ID NO: 879), AUGguaaaga (SEQ ID NO: 880), AUGguaaaua (SEQ ID NO: 881), AUGguaaaug (SEQ ID NO: 882), AUGguaaauu (SEQ ID NO: 883), AUGguaacag (SEQ ID NO: 884), AUGguaacau (SEQ ID NO: 885), AUGguaacua (SEQ ID NO: 886), AUGguaacuc (SEQ ID NO: 887), AUGguaacuu (SEQ ID NO: 888), AUGguaagaa (SEQ ID NO: 889), AUGguaagac (SEQ ID NO: 890), AUGguaagag (SEQ ID NO: 891), AUGguaagau (SEQ ID NO: 892), AUGguaagca (SEQ ID NO: 893), AUGguaagcc (SEQ ID NO: 894), AUGguaagcu (SEQ ID NO: 895), AUGguaagga (SEQ ID NO: 896), AUGguaaggg (SEQ ID NO: 897), AUGguaagua (SEQ ID NO: 898), AUGguaaguc (SEQ ID NO: 899), AUGguaagug (SEQ ID NO: 900), AUGguaaguu (SEQ ID NO: 901), AUGguaauaa (SEQ ID NO: 902), AUGguaauau (SEQ ID NO: 903), AUGguaauga (SEQ ID NO: 904), AUGguaaugg (SEQ ID NO: 905), AUGguaauug (SEQ ID NO: 906), AUGguaauuu (SEQ ID NO: 907), AUGguacage (SEQ ID NO: 908), AUGguacauc (SEQ ID NO: 909), AUGguaccag (SEQ ID NO: 910), AUGguaccug (SEQ ID NO: 911), AUGguacgag (SEQ ID NO: 912), AUGguacggu (SEQ ID NO: 913), AUGguagauc (SEQ ID NO: 914), AUGguagcag (SEQ ID NO: 915), AUGguagcug (SEQ ID NO: 916), AUGguaggaa (SEQ ID NO: 917), AUGguaggau (SEQ ID NO: 918), AUGguaggca (SEQ ID NO: 919), AUGguaggcu (SEQ ID NO: 920), AUGguagggg (SEQ ID NO: 921), AUGguagggu (SEQ ID NO: 922), AUGguaggua (SEQ ID NO: 923), AUGguaggug (SEQ ID NO: 924), AUGguaguuu (SEQ ID NO: 925), AUGguauagu (SEQ ID NO: 926), AUGguauaua (SEQ ID NO: 927), AUGguaucag (SEQ ID NO: 928), AUGguaucuu (SEQ ID NO: 929), AUGguaugau (SEQ ID NO: 930), AUGguaugca (SEQ ID NO: 931), AUGguaugcc (SEQ ID NO: 932), AUGguaugcg (SEQ ID NO: 933), AUGguaugcu (SEQ ID NO: 934), AUGguaugga (SEQ ID NO: 935), AUGguauggc (SEQ ID NO: 936), AUGguaugug (SEQ ID NO: 937), AUGguauguu (SEQ ID NO: 938), AUGguauuau (SEQ ID NO: 939), AUGguauuga (SEQ ID NO: 940), AUGguauuug (SEQ ID NO: 941), AUGgucaggg (SEQ ID NO: 942), AUGgucaguc (SEQ ID NO: 943), AUGgucagug (SEQ ID NO: 944), AUGgucauuu (SEQ ID NO: 945), AUGgugaaaa (SEQ ID NO: 946), AUGgugaaac (SEQ ID NO: 947), AUGgugaaau (SEQ ID NO: 948), AUGgugaacu (SEQ ID NO: 949), AUGgugaaga (SEQ ID NO: 950), AUGgugacgu (SEQ ID NO: 951), AUGgugagaa (SEQ ID NO: 952), AUGgugagac (SEQ ID NO: 953), AUGgugagag (SEQ ID NO: 954), AUGgugagca (SEQ ID NO: 955), AUGgugagcc (SEQ ID NO: 956), AUGgugagcg (SEQ ID NO: 957), AUGgugagcu (SEQ ID NO: 958), AUGgugaggc (SEQ ID NO: 959), AUGgugaggg (SEQ ID NO: 960), AUGgugagua (SEQ ID NO: 961), AUGgugaguc (SEQ ID NO: 962), AUGgugagug (SEQ ID NO: 963), AUGgugaguu (SEQ ID NO: 964), AUGgugauuu (SEQ ID NO: 965), AUGgugcgau (SEQ ID NO: 966), AUGgugcgug (SEQ ID NO: 967), AUGgugggua (SEQ ID NO: 968), AUGgugggug (SEQ ID NO: 969), AUGguggguu (SEQ ID NO: 970), AUGgugguua (SEQ ID NO: 971), AUGguguaag (SEQ ID NO: 972), AUGgugugaa (SEQ ID NO: 973), AUGgugugua (SEQ ID NO: 974), AUGgugugug (SEQ ID NO: 975), AUGguuacuc (SEQ ID NO: 976), AUGguuagca (SEQ ID NO: 977), AUGguuaguc (SEQ ID NO: 978), AUGguuagug (SEQ ID NO: 979), AUGguuaguu (SEQ ID NO: 980), AUGguucagu (SEQ ID NO: 981), AUGguucguc (SEQ ID NO: 982), AUGguuggua (SEQ ID NO: 983), AUGguugguc (SEQ ID NO: 984), AUGguugguu (SEQ ID NO: 985), AUGguuguuu (SEQ ID NO: 986), AUGguuugca (SEQ ID NO: 987), AUGguuugua (SEQ ID NO: 988), AUUgcaagua (SEQ ID NO: 989), AUUguaaaua (SEQ ID NO: 990), AUUguaagau (SEQ ID NO: 991), AUUguaagca (SEQ ID NO: 992), AUUguaagga (SEQ ID NO: 993), AUUguaaggc (SEQ ID NO: 994), AUUguaagua (SEQ ID NO: 995), AUUguaaguc (SEQ ID NO: 996), AUUguaaguu (SEQ ID NO: 997), AUUguaauua (SEQ ID NO: 998), AUUguaauuu (SEQ ID NO: 999), AUUguacaaa (SEQ ID NO: 1000), AUUguaccuc (SEQ ID NO: 1001), AUUguacgug (SEQ ID NO: 1002), AUUguacuug (SEQ ID NO: 1003), AUUguaggua (SEQ ID NO: 1004), AUUguaugag (SEQ ID NO: 1005), AUUguaugua (SEQ ID NO: 1006), AUUgucuguu (SEQ ID NO: 1007), AUUgugagcu (SEQ ID NO: 1008), AUUgugagua (SEQ ID NO: 1009), AUUgugaguc (SEQ ID NO: 1010), AUUgugaguu (SEQ ID NO: 1011), AUUgugcgug (SEQ ID NO: 1012), AUUgugggug (SEQ ID NO: 1013), AUUguuagug (SEQ ID NO: 1014), CAAguaaaaa (SEQ ID NO: 1015), CAAguaaaua (SEQ ID NO: 1016), CAAguaaauc (SEQ ID NO: 1017), CAAguaaaug (SEQ ID NO: 1018), CAAguaaccc (SEQ ID NO: 1019), CAAguaacua (SEQ ID NO: 1020), CAAguaacug (SEQ ID NO: 1021), CAAguaagaa (SEQ ID NO: 1022), CAAguaagac (SEQ ID NO: 1023), CAAguaagau (SEQ ID NO: 1024), CAAguaaggu (SEQ ID NO: 1025), CAAguaagua (SEQ ID NO: 1026), CAAguaaguc (SEQ ID NO: 1027), CAAguaagug (SEQ ID NO: 1028), CAAguaaguu (SEQ ID NO: 1029), CAAguaaucc (SEQ ID NO: 1030), CAAguaaucu (SEQ ID NO: 1031), CAAguaauua (SEQ ID NO: 1032), CAAguaauuc (SEQ ID NO: 1033), CAAguaauug (SEQ ID NO: 1034), CAAguaauuu (SEQ ID NO: 1035), CAAguacaca (SEQ ID NO: 1036), CAAguacguu (SEQ ID NO: 1037), CAAguacuuu (SEQ ID NO: 1038), CAAguagcug (SEQ ID NO: 1039), CAAguaggau (SEQ ID NO: 1040), CAAguaggua (SEQ ID NO: 1041), CAAguagguc (SEQ ID NO: 1042), CAAguaggug (SEQ ID NO: 1043), CAAguagguu (SEQ ID NO: 1044), CAAguaguuu (SEQ ID NO: 1045), CAAguauaac (SEQ ID NO: 1046), CAAguauaug (SEQ ID NO: 1047), CAAguaucuu (SEQ ID NO: 1048), CAAguaugag (SEQ ID NO: 1049), CAAguaugua (SEQ ID NO: 1050), CAAguauguc (SEQ ID NO: 1051), CAAguaugug (SEQ ID NO: 1052), CAAguauguu (SEQ ID NO: 1053), CAAguauuga (SEQ ID NO: 1054), CAAguauuuc (SEQ ID NO: 1055), CAAgucagac (SEQ ID NO: 1056), CAAgucagua (SEQ ID NO: 1057), CAAgucuaua (SEQ ID NO: 1058), CAAgucugau (SEQ ID NO: 1059), CAAgugacuu (SEQ ID NO: 1060), CAAgugagaa (SEQ ID NO: 1061), CAAgugagac (SEQ ID NO: 1062), CAAgugagca (SEQ ID NO: 1063), CAAgugaggc (SEQ ID NO: 1064), CAAgugaggg (SEQ ID NO: 1065), CAAgugagua (SEQ ID NO: 1066), CAAgugaguc (SEQ ID NO: 1067), CAAgugagug (SEQ ID NO: 1068), CAAgugaucc (SEQ ID NO: 1069), CAAgugaucu (SEQ ID NO: 1070), CAAgugauuc (SEQ ID NO: 1071), CAAgugauug (SEQ ID NO: 1072), CAAgugauuu (SEQ ID NO: 1073), CAAgugccuu (SEQ ID NO: 1074), CAAgugggua (SEQ ID NO: 1075), CAAguggguc (SEQ ID NO: 1076), CAAgugggug (SEQ ID NO: 1077), CAAgugugag (SEQ ID NO: 1078), CAAguuaaaa (SEQ ID NO: 1079), CAAguuaagu (SEQ ID NO: 1080), CAAguuaauc (SEQ ID NO: 1081), CAAguuagaa (SEQ ID NO: 1082), CAAguuaguu (SEQ ID NO: 1083), CAAguucaag (SEQ ID NO: 1084), CAAguuccgu (SEQ ID NO: 1085), CAAguuggua (SEQ ID NO: 1086), CAAguuuagu (SEQ ID NO: 1087), CAAguuucca (SEQ ID NO: 1088), CAAguuuguu (SEQ ID NO: 1089), CACguaagag (SEQ ID NO: 1090), CACguaagca (SEQ ID NO: 1091), CACguaauug (SEQ ID NO: 1092), CACguaggac (SEQ ID NO: 1093), CACguaucga (SEQ ID NO: 1094), CACgucaguu (SEQ ID NO: 1095), CACgugagcu (SEQ ID NO: 1096), CACgugaguc (SEQ ID NO: 1097), CACgugagug (SEQ ID NO: 1098), CAGgcaagaa (SEQ ID NO: 1099), CAGgcaagac (SEQ ID NO: 1100), CAGgcaagag (SEQ ID NO: 1101), CAGgcaagga (SEQ ID NO: 1102), CAGgcaagua (SEQ ID NO: 1103), CAGgcaagug (SEQ ID NO: 1104), CAGgcaaguu (SEQ ID NO: 1105), CAGgcacgca (SEQ ID NO: 1106), CAGgcagagg (SEQ ID NO: 1107), CAGgcaggug (SEQ ID NO: 1108), CAGgcaucau (SEQ ID NO: 1109), CAGgcaugaa (SEQ ID NO: 1110), CAGgcaugag (SEQ ID NO: 1111), CAGgcaugca (SEQ ID NO: 1112), CAGgcaugcg (SEQ ID NO: 1113), CAGgcaugug (SEQ ID NO: 1114), CAGgcgagag (SEQ ID NO: 1115), CAGgcgccug (SEQ ID NO: 1116), CAGgcgugug (SEQ ID NO: 1117), CAGguaaaaa (SEQ ID NO: 1118), CAGguaaaag (SEQ ID NO: 1119), CAGguaaaca (SEQ ID NO: 1120), CAGguaaacc (SEQ ID NO: 1121), CAGguaaaga (SEQ ID NO: 1122), CAGguaaagc (SEQ ID NO: 1123), CAGguaaagu (SEQ ID NO: 1124), CAGguaaaua (SEQ ID NO: 1125), CAGguaaauc (SEQ ID NO: 1126), CAGguaaaug (SEQ ID NO: 1127), CAGguaaauu (SEQ ID NO: 1128), CAGguaacag (SEQ ID NO: 1129), CAGguaacau (SEQ ID NO: 1130), CAGguaacca (SEQ ID NO: 1131), CAGguaaccg (SEQ ID NO: 1132), CAGguaacgu (SEQ ID NO: 1133), CAGguaacua (SEQ ID NO: 1134), CAGguaacuc (SEQ ID NO: 1135), CAGguaacug (SEQ ID NO: 1136), CAGguaacuu (SEQ ID NO: 1137), CAGguaagaa (SEQ ID NO: 1138), CAGguaagac (SEQ ID NO: 1139), CAGguaagag (SEQ ID NO: 1140), CAGguaagau (SEQ ID NO: 1141), CAGguaagcc (SEQ ID NO: 1142), CAGguaagga (SEQ ID NO: 1143), CAGguaaggc (SEQ ID NO: 1144), CAGguaaggg (SEQ ID NO: 1145), CAGguaaggu (SEQ ID NO: 1146), CAGguaagua (SEQ ID NO: 1147), CAGguaagug (SEQ ID NO: 1148), CAGguaaguu (SEQ ID NO: 1149), CAGguaauaa (SEQ ID NO: 1150), CAGguaauau (SEQ ID NO: 1151), CAGguaaucc (SEQ ID NO: 1152), CAGguaaugc (SEQ ID NO: 1153), CAGguaaugg (SEQ ID NO: 1154), CAGguaaugu (SEQ ID NO: 1155), CAGguaauua (SEQ ID NO: 1156), CAGguaauuc (SEQ ID NO: 1157), CAGguaauug (SEQ ID NO: 1158), CAGguaauuu (SEQ ID NO: 1159), CAGguacaaa (SEQ ID NO: 1160), CAGguacaag (SEQ ID NO: 1161), CAGguacaau (SEQ ID NO: 1162), CAGguacaca (SEQ ID NO: 1163), CAGguacacg (SEQ ID NO: 1164), CAGguacaga (SEQ ID NO: 1165), CAGguacagg (SEQ ID NO: 1166), CAGguacagu (SEQ ID NO: 1167), CAGguacaua (SEQ ID NO: 1168), CAGguacaug (SEQ ID NO: 1169), CAGguacauu (SEQ ID NO: 1170), CAGguaccac (SEQ ID NO: 1171), CAGguaccca (SEQ ID NO: 1172), CAGguacccg (SEQ ID NO: 1173), CAGguacccu (SEQ ID NO: 1174), CAGguaccgc (SEQ ID NO: 1175), CAGguaccgg (SEQ ID NO: 1176), CAGguaccuc (SEQ ID NO: 1177), CAGguaccug (SEQ ID NO: 1178), CAGguaccuu (SEQ ID NO: 1179), CAGguacgag (SEQ ID NO: 1180), CAGguacgca (SEQ ID NO: 1181), CAGguacgcc (SEQ ID NO: 1182), CAGguacggu (SEQ ID NO: 1183), CAGguacgua (SEQ ID NO: 1184), CAGguacgug (SEQ ID NO: 1185), CAGguacuaa (SEQ ID NO: 1186), CAGguacuag (SEQ ID NO: 1187), CAGguacuau (SEQ ID NO: 1188), CAGguacucc (SEQ ID NO: 1189), CAGguacucu (SEQ ID NO: 1190), CAGguacuga (SEQ ID NO: 1191), CAGguacugc (SEQ ID NO: 1192), CAGguacugu (SEQ ID NO: 1193), CAGguacuua (SEQ ID NO: 1194), CAGguacuuu (SEQ ID NO: 1195), CAGguagaaa (SEQ ID NO: 1196), CAGguagaac (SEQ ID NO: 1197), CAGguagaag (SEQ ID NO: 1198), CAGguagaca (SEQ ID NO: 1199), CAGguagacc (SEQ ID NO: 1200), CAGguagaga (SEQ ID NO: 1201), CAGguagauu (SEQ ID NO: 1202), CAGguagcaa (SEQ ID NO: 1203), CAGguagcac (SEQ ID NO: 1204), CAGguagcag (SEQ ID NO: 1205), CAGguagcca (SEQ ID NO: 1206), CAGguagcgu (SEQ ID NO: 1207), CAGguagcua (SEQ ID NO: 1208), CAGguagcuc (SEQ ID NO: 1209), CAGguagcug (SEQ ID NO: 1210), CAGguagcuu (SEQ ID NO: 1211), CAGguaggaa (SEQ ID NO: 1212), CAGguaggac (SEQ ID NO: 1213), CAGguaggag (SEQ ID NO: 1214), CAGguaggca (SEQ ID NO: 1215), CAGguaggga (SEQ ID NO: 1216), CAGguagggc (SEQ ID NO: 1217), CAGguagggg (SEQ ID NO: 1218), CAGguagggu (SEQ ID NO: 1219), CAGguaggua (SEQ ID NO: 1220), CAGguagguc (SEQ ID NO: 1221), CAGguaggug (SEQ ID NO: 1222), CAGguagguu (SEQ ID NO: 1223), CAGguaguaa (SEQ ID NO: 1224), CAGguaguau (SEQ ID NO: 1225), CAGguaguca (SEQ ID NO: 1226), CAGguagucc (SEQ ID NO: 1227), CAGguaguga (SEQ ID NO: 1228), CAGguagugu (SEQ ID NO: 1229), CAGguaguuc (SEQ ID NO: 1230), CAGguaguug (SEQ ID NO: 1231), CAGguaguuu (SEQ ID NO: 1232), CAGguauaag (SEQ ID NO: 1233), CAGguauaca (SEQ ID NO: 1234), CAGguauaga (SEQ ID NO: 1235), CAGguauauc (SEQ ID NO: 1236), CAGguauaug (SEQ ID NO: 1237), CAGguauauu (SEQ ID NO: 1238), CAGguaucag (SEQ ID NO: 1239), CAGguaucau (SEQ ID NO: 1240), CAGguauccu (SEQ ID NO: 1241), CAGguaucga (SEQ ID NO: 1242), CAGguaucgc (SEQ ID NO: 1243), CAGguaucua (SEQ ID NO: 1244), CAGguaucug (SEQ ID NO: 1245), CAGguaucuu (SEQ ID NO: 1246), CAGguaugaa (SEQ ID NO: 1247), CAGguaugac (SEQ ID NO: 1248), CAGguaugag (SEQ ID NO: 1249), CAGguaugau (SEQ ID NO: 1250), CAGguaugca (SEQ ID NO: 1251), CAGguaugcc (SEQ ID NO: 1252), CAGguaugcg (SEQ ID NO: 1253), CAGguaugcu (SEQ ID NO: 1254), CAGguaugga (SEQ ID NO: 1255), CAGguauggg (SEQ ID NO: 1256), CAGguauggu (SEQ ID NO: 1257), CAGguaugua (SEQ ID NO: 1258), CAGguauguc (SEQ ID NO: 1259), CAGguaugug (SEQ ID NO: 1260), CAGguauguu (SEQ ID NO: 1261), CAGguauuau (SEQ ID NO: 1262), CAGguauuca (SEQ ID NO: 1263), CAGguauucu (SEQ ID NO: 1264), CAGguauuga (SEQ ID NO: 1265), CAGguauugg (SEQ ID NO: 1266), CAGguauugu (SEQ ID NO: 1267), CAGguauuua (SEQ ID NO: 1268), CAGguauuuc (SEQ ID NO: 1269), CAGguauuug (SEQ ID NO: 1270), CAGguauuuu (SEQ ID NO: 1271), CAGgucaaca (SEQ ID NO: 1272), CAGgucaaug (SEQ ID NO: 1273), CAGgucacgu (SEQ ID NO: 1274), CAGgucagaa (SEQ ID NO: 1275), CAGgucagac (SEQ ID NO: 1276), CAGgucagca (SEQ ID NO: 1277), CAGgucagcc (SEQ ID NO: 1278), CAGgucagcg (SEQ ID NO: 1279), CAGgucagga (SEQ ID NO: 1280), CAGgucagua (SEQ ID NO: 1281), CAGgucaguc (SEQ ID NO: 1282), CAGgucagug (SEQ ID NO: 1283), CAGgucaguu (SEQ ID NO: 1284), CAGgucaucc (SEQ ID NO: 1285), CAGgucaugc (SEQ ID NO: 1286), CAGgucauua (SEQ ID NO: 1287), CAGgucauuu (SEQ ID NO: 1288), CAGguccacc (SEQ ID NO: 1289), CAGguccacu (SEQ ID NO: 1290), CAGguccagu (SEQ ID NO: 1291), CAGguccauc (SEQ ID NO: 1292), CAGguccauu (SEQ ID NO: 1293), CAGgucccag (SEQ ID NO: 1294), CAGgucccug (SEQ ID NO: 1295), CAGguccuga (SEQ ID NO: 1296), CAGguccugc (SEQ ID NO: 1297), CAGguccugg (SEQ ID NO: 1298), CAGgucggcc (SEQ ID NO: 1299), CAGgucggug (SEQ ID NO: 1300), CAGgucguug (SEQ ID NO: 1301), CAGgucucuc (SEQ ID NO: 1302), CAGgucucuu (SEQ ID NO: 1303), CAGgucugag (SEQ ID NO: 1304), CAGgucugcc (SEQ ID NO: 1305), CAGgucugcg (SEQ ID NO: 1306), CAGgucugga (SEQ ID NO: 1307), CAGgucuggu (SEQ ID NO: 1308), CAGgucugua (SEQ ID NO: 1309), CAGgucuguc (SEQ ID NO: 1310), CAGgucugug (SEQ ID NO: 1311), CAGgucuguu (SEQ ID NO: 1312), CAGgucuucc (SEQ ID NO: 1313), CAGgucuuuc (SEQ ID NO: 1314), CAGgugaaag (SEQ ID NO: 1315), CAGgugaaau (SEQ ID NO: 1316), CAGgugaaca (SEQ ID NO: 1317), CAGgugaaga (SEQ ID NO: 1318), CAGgugaagg (SEQ ID NO: 1319), CAGgugaaua (SEQ ID NO: 1320), CAGgugaauc (SEQ ID NO: 1321), CAGgugaauu (SEQ ID NO: 1322), CAGgugacaa (SEQ ID NO: 1323), CAGgugacau (SEQ ID NO: 1324), CAGgugacca (SEQ ID NO: 1325), CAGgugaccc (SEQ ID NO: 1326), CAGgugaccg (SEQ ID NO: 1327), CAGgugaccu (SEQ ID NO: 1328), CAGgugacgg (SEQ ID NO: 1329), CAGgugacua (SEQ ID NO: 1330), CAGgugacuc (SEQ ID NO: 1331), CAGgugacug (SEQ ID NO: 1332), CAGgugagaa (SEQ ID NO: 1333), CAGgugagac (SEQ ID NO: 1334), CAGgugagag (SEQ ID NO: 1335), CAGgugagau (SEQ ID NO: 1336), CAGgugagca (SEQ ID NO: 1337), CAGgugagcc (SEQ ID NO: 1338), CAGgugagcg (SEQ ID NO: 1339), CAGgugagcu (SEQ ID NO: 1340), CAGgugagga (SEQ ID NO: 1341), CAGgugaggc (SEQ ID NO: 1342), CAGgugaggg (SEQ ID NO: 1343), CAGgugaggu (SEQ ID NO: 1344), CAGgugagua (SEQ ID NO: 1345), CAGgugaguc (SEQ ID NO: 1346), CAGgugagug (SEQ ID NO: 1347), CAGgugaguu (SEQ ID NO: 1348), CAGgugauaa (SEQ ID NO: 1349), CAGgugaucc (SEQ ID NO: 1350), CAGgugaucu (SEQ ID NO: 1351), CAGgugaugc (SEQ ID NO: 1352), CAGgugaugg (SEQ ID NO: 1353), CAGgugaugu (SEQ ID NO: 1354), CAGgugauua (SEQ ID NO: 1355), CAGgugauuc (SEQ ID NO: 1356), CAGgugauug (SEQ ID NO: 1357), CAGgugauuu (SEQ ID NO: 1358), CAGgugcaaa (SEQ ID NO: 1359), CAGgugcaag (SEQ ID NO: 1360), CAGgugcaca (SEQ ID NO: 1361), CAGgugcacg (SEQ ID NO: 1362), CAGgugcaga (SEQ ID NO: 1363), CAGgugcagg (SEQ ID NO: 1364), CAGgugcaua (SEQ ID NO: 1365), CAGgugcauc (SEQ ID NO: 1366), CAGgugcaug (SEQ ID NO: 1367), CAGgugccaa (SEQ ID NO: 1368), CAGgugccca (SEQ ID NO: 1369), CAGgugcccc (SEQ ID NO: 1370), CAGgugcccg (SEQ ID NO: 1371), CAGgugccua (SEQ ID NO: 1372), CAGgugccug (SEQ ID NO: 1373), CAGgugcgaa (SEQ ID NO: 1374), CAGgugcgca (SEQ ID NO: 1375), CAGgugcgcc (SEQ ID NO: 1376), CAGgugcgcg (SEQ ID NO: 1377), CAGgugcgga (SEQ ID NO: 1378), CAGgugcggu (SEQ ID NO: 1379), CAGgugcgua (SEQ ID NO: 1380), CAGgugcguc (SEQ ID NO: 1381), CAGgugcgug (SEQ ID NO: 1382), CAGgugcuag (SEQ ID NO: 1383), CAGgugcuau (SEQ ID NO: 1384), CAGgugcuca (SEQ ID NO: 1385), CAGgugcucc (SEQ ID NO: 1386), CAGgugcucg (SEQ ID NO: 1387), CAGgugcugc (SEQ ID NO: 1388), CAGgugcugg (SEQ ID NO: 1389), CAGgugcuua (SEQ ID NO: 1390), CAGgugcuuc (SEQ ID NO: 1391), CAGgugcuug (SEQ ID NO: 1392), CAGguggaac (SEQ ID NO: 1393), CAGguggaag (SEQ ID NO: 1394), CAGguggaau (SEQ ID NO: 1395), CAGguggaga (SEQ ID NO: 1396), CAGguggagu (SEQ ID NO: 1397), CAGguggauu (SEQ ID NO: 1398), CAGguggcca (SEQ ID NO: 1399), CAGguggcuc (SEQ ID NO: 1400), CAGguggcug (SEQ ID NO: 1401), CAGgugggaa (SEQ ID NO: 1402), CAGgugggac (SEQ ID NO: 1403), CAGgugggag (SEQ ID NO: 1404), CAGgugggau (SEQ ID NO: 1405), CAGgugggca (SEQ ID NO: 1406), CAGgugggcc (SEQ ID NO: 1407), CAGgugggcu (SEQ ID NO: 1408), CAGgugggga (SEQ ID NO: 1409), CAGguggggc (SEQ ID NO: 1410), CAGguggggg (SEQ ID NO: 1411), CAGguggggu (SEQ ID NO: 1412), CAGgugggua (SEQ ID NO: 1413), CAGguggguc (SEQ ID NO: 1414), CAGgugggug (SEQ ID NO: 1415), CAGguggguu (SEQ ID NO: 1416), CAGguggucu (SEQ ID NO: 1417), CAGguggugg (SEQ ID NO: 1418), CAGgugguug (SEQ ID NO: 1419), CAGguguaca (SEQ ID NO: 1420), CAGguguagg (SEQ ID NO: 1421), CAGguguauc (SEQ ID NO: 1422), CAGgugucac (SEQ ID NO: 1423), CAGgugucag (SEQ ID NO: 1424), CAGgugucca (SEQ ID NO: 1425), CAGguguccu (SEQ ID NO: 1426), CAGgugucua (SEQ ID NO: 1427), CAGgugucuc (SEQ ID NO: 1428), CAGgugucug (SEQ ID NO: 1429), CAGgugugaa (SEQ ID NO: 1430), CAGgugugac (SEQ ID NO: 1431), CAGgugugag (SEQ ID NO: 1432), CAGgugugau (SEQ ID NO: 1433), CAGgugugca (SEQ ID NO: 1434), CAGgugugcc (SEQ ID NO: 1435), CAGgugugcg (SEQ ID NO: 1436), CAGgugugcu (SEQ ID NO: 1437), CAGgugugga (SEQ ID NO: 1438), CAGguguggc (SEQ ID NO: 1439), CAGgugugua (SEQ ID NO: 1440), CAGguguguc (SEQ ID NO: 1441), CAGgugugug (SEQ ID NO: 1442), CAGguguguu (SEQ ID NO: 1443), CAGguguuua (SEQ ID NO: 1444), CAGguuaaaa (SEQ ID NO: 1445), CAGguuaaua (SEQ ID NO: 1446), CAGguuaauc (SEQ ID NO: 1447), CAGguuaccu (SEQ ID NO: 1448), CAGguuagaa (SEQ ID NO: 1449), CAGguuagag (SEQ ID NO: 1450), CAGguuagau (SEQ ID NO: 1451), CAGguuagcc (SEQ ID NO: 1452), CAGguuaggg (SEQ ID NO: 1453), CAGguuaggu (SEQ ID NO: 1454), CAGguuagua (SEQ ID NO: 1455), CAGguuaguc (SEQ ID NO: 1456), CAGguuagug (SEQ ID NO: 1457), CAGguuaguu (SEQ ID NO: 1458), CAGguuauca (SEQ ID NO: 1459), CAGguuaugu (SEQ ID NO: 1460), CAGguuauua (SEQ ID NO: 1461), CAGguuauug (SEQ ID NO: 1462), CAGguucaaa (SEQ ID NO: 1463), CAGguucaac (SEQ ID NO: 1464), CAGguucaag (SEQ ID NO: 1465), CAGguucaca (SEQ ID NO: 1466), CAGguucacg (SEQ ID NO: 1467), CAGguucagg (SEQ ID NO: 1468), CAGguucaug (SEQ ID NO: 1469), CAGguuccag (SEQ ID NO: 1470), CAGguuccca (SEQ ID NO: 1471), CAGguucccg (SEQ ID NO: 1472), CAGguucgaa (SEQ ID NO: 1473), CAGguucgag (SEQ ID NO: 1474), CAGguucuau (SEQ ID NO: 1475), CAGguucugc (SEQ ID NO: 1476), CAGguucuua (SEQ ID NO: 1477), CAGguucuuc (SEQ ID NO: 1478), CAGguucuuu (SEQ ID NO: 1479), CAGguugaac (SEQ ID NO: 1480), CAGguugaag (SEQ ID NO: 1481), CAGguugagu (SEQ ID NO: 1482), CAGguugaua (SEQ ID NO: 1483), CAGguuggag (SEQ ID NO: 1484), CAGguuggca (SEQ ID NO: 1485), CAGguuggcc (SEQ ID NO: 1486), CAGguugguc (SEQ ID NO: 1487), CAGguuggug (SEQ ID NO: 1488), CAGguugguu (SEQ ID NO: 1489), CAGguuguaa (SEQ ID NO: 1490), CAGguuguac (SEQ ID NO: 1491), CAGguuguau (SEQ ID NO: 1492), CAGguuguca (SEQ ID NO: 1493), CAGguuguga (SEQ ID NO: 1494), CAGguuguug (SEQ ID NO: 1495), CAGguuuaag (SEQ ID NO: 1496), CAGguuuacc (SEQ ID NO: 1497), CAGguuuagc (SEQ ID NO: 1498), CAGguuuagu (SEQ ID NO: 1499), CAGguuucuu (SEQ ID NO: 1500), CAGguuugaa (SEQ ID NO: 1501), CAGguuugag (SEQ ID NO: 1502), CAGguuugau (SEQ ID NO: 1503), CAGguuugcc (SEQ ID NO: 1504), CAGguuugcu (SEQ ID NO: 1505), CAGguuuggg (SEQ ID NO: 1506), CAGguuuggu (SEQ ID NO: 1507), CAGguuugua (SEQ ID NO: 1508), CAGguuugug (SEQ ID NO: 1509), CAGguuuguu (SEQ ID NO: 1510), CAGguuuucu (SEQ ID NO: 1511), CAGguuuugg (SEQ ID NO: 1512), CAGguuuuuc (SEQ ID NO: 1513), CAGguuuuuu (SEQ ID NO: 1514), CAUgcagguu (SEQ ID NO: 1515), CAUguaaaac (SEQ ID NO: 1516), CAUguaacua (SEQ ID NO: 1517), CAUguaagaa (SEQ ID NO: 1518), CAUguaagag (SEQ ID NO: 1519), CAUguaagau (SEQ ID NO: 1520), CAUguaagcc (SEQ ID NO: 1521), CAUguaagua (SEQ ID NO: 1522), CAUguaagug (SEQ ID NO: 1523), CAUguaaguu (SEQ ID NO: 1524), CAUguaauua (SEQ ID NO: 1525), CAUguacaua (SEQ ID NO: 1526), CAUguaccac (SEQ ID NO: 1527), CAUguacguu (SEQ ID NO: 1528), CAUguaggua (SEQ ID NO: 1529), CAUguaggug (SEQ ID NO: 1530), CAUguagguu (SEQ ID NO: 1531), CAUguaugaa (SEQ ID NO: 1532), CAUguaugua (SEQ ID NO: 1533), CAUguaugug (SEQ ID NO: 1534), CAUguauguu (SEQ ID NO: 1535), CAUgugagaa (SEQ ID NO: 1536), CAUgugagca (SEQ ID NO: 1537), CAUgugagcu (SEQ ID NO: 1538), CAUgugagua (SEQ ID NO: 1539), CAUgugaguc (SEQ ID NO: 1540), CAUgugagug (SEQ ID NO: 1541), CAUgugaguu (SEQ ID NO: 1542), CAUgugcgua (SEQ ID NO: 1543), CAUgugggaa (SEQ ID NO: 1544), CAUguggguu (SEQ ID NO: 1545), CAUgugugug (SEQ ID NO: 1546), CAUguguguu (SEQ ID NO: 1547), CAUguuaaua (SEQ ID NO: 1548), CAUguuagcc (SEQ ID NO: 1549), CCAguaagau (SEQ ID NO: 1550), CCAguaagca (SEQ ID NO: 1551), CCAguaagcc (SEQ ID NO: 1552), CCAguaagcu (SEQ ID NO: 1553), CCAguaagga (SEQ ID NO: 1554), CCAguaagua (SEQ ID NO: 1555), CCAguaaguc (SEQ ID NO: 1556), CCAguaagug (SEQ ID NO: 1557), CCAguaaguu (SEQ ID NO: 1558), CCAguaauug (SEQ ID NO: 1559), CCAguacggg (SEQ ID NO: 1560), CCAguagguc (SEQ ID NO: 1561), CCAguauugu (SEQ ID NO: 1562), CCAgugaggc (SEQ ID NO: 1563), CCAgugagua (SEQ ID NO: 1564), CCAgugagug (SEQ ID NO: 1565), CCAguggguc (SEQ ID NO: 1566), CCAguuaguu (SEQ ID NO: 1567), CCAguugagu (SEQ ID NO: 1568), CCCguaagau (SEQ ID NO: 1569), CCCguauguc (SEQ ID NO: 1570), CCCguauguu (SEQ ID NO: 1571), CCCguccugc (SEQ ID NO: 1572), CCCgugagug (SEQ ID NO: 1573), CCGguaaaga (SEQ ID NO: 1574), CCGguaagau (SEQ ID NO: 1575), CCGguaagcc (SEQ ID NO: 1576), CCGguaagga (SEQ ID NO: 1577), CCGguaaggc (SEQ ID NO: 1578), CCGguaaugg (SEQ ID NO: 1579), CCGguacagu (SEQ ID NO: 1580), CCGguacuga (SEQ ID NO: 1581), CCGguauucc (SEQ ID NO: 1582), CCGgucagug (SEQ ID NO: 1583), CCGgugaaaa (SEQ ID NO: 1584), CCGgugagaa (SEQ ID NO: 1585), CCGgugaggg (SEQ ID NO: 1586), CCGgugagug (SEQ ID NO: 1587), CCGgugaguu (SEQ ID NO: 1588), CCGgugcgcg (SEQ ID NO: 1589), CCGgugggcg (SEQ ID NO: 1590), CCGguugguc (SEQ ID NO: 1591), CCUguaaaug (SEQ ID NO: 1592), CCUguaaauu (SEQ ID NO: 1593), CCUguaagaa (SEQ ID NO: 1594), CCUguaagac (SEQ ID NO: 1595), CCUguaagag (SEQ ID NO: 1596), CCUguaagca (SEQ ID NO: 1597), CCUguaagcg (SEQ ID NO: 1598), CCUguaagga (SEQ ID NO: 1599), CCUguaaguu (SEQ ID NO: 1600), CCUguaggua (SEQ ID NO: 1601), CCUguaggug (SEQ ID NO: 1602), CCUguaucuu (SEQ ID NO: 1603), CCUguauggu (SEQ ID NO: 1604), CCUguaugug (SEQ ID NO: 1605), CCUgugagaa (SEQ ID NO: 1606), CCUgugagca (SEQ ID NO: 1607), CCUgugaggg (SEQ ID NO: 1608), CCUgugaguc (SEQ ID NO: 1609), CCUgugagug (SEQ ID NO: 1610), CCUgugaguu (SEQ ID NO: 1611), CCUguggcuc (SEQ ID NO: 1612), CCUgugggua (SEQ ID NO: 1613), CCUgugugua (SEQ ID NO: 1614), CCUguuagaa (SEQ ID NO: 1615), CGAguaaggg (SEQ ID NO: 1616), CGAguaaggu (SEQ ID NO: 1617), CGAguagcug (SEQ ID NO: 1618), CGAguaggug (SEQ ID NO: 1619), CGAguagguu (SEQ ID NO: 1620), CGAgugagca (SEQ ID NO: 1621), CGCguaagag (SEQ ID NO: 1622), CGGgcaggca (SEQ ID NO: 1623), CGGguaagcc (SEQ ID NO: 1624), CGGguaagcu (SEQ ID NO: 1625), CGGguaaguu (SEQ ID NO: 1626), CGGguaauuc (SEQ ID NO: 1627), CGGguaauuu (SEQ ID NO: 1628), CGGguacagu (SEQ ID NO: 1629), CGGguacggg (SEQ ID NO: 1630), CGGguaggag (SEQ ID NO: 1631), CGGguaggcc (SEQ ID NO: 1632), CGGguaggug (SEQ ID NO: 1633), CGGguauuua (SEQ ID NO: 1634), CGGgucugag (SEQ ID NO: 1635), CGGgugaccg (SEQ ID NO: 1636), CGGgugacuc (SEQ ID NO: 1637), CGGgugagaa (SEQ ID NO: 1638), CGGgugaggg (SEQ ID NO: 1639), CGGgugaggu (SEQ ID NO: 1640), CGGgugagua (SEQ ID NO: 1641), CGGgugagug (SEQ ID NO: 1642), CGGgugaguu (SEQ ID NO: 1643), CGGgugauuu (SEQ ID NO: 1644), CGGgugccuu (SEQ ID NO: 1645), CGGgugggag (SEQ ID NO: 1646), CGGgugggug (SEQ ID NO: 1647), CGGguggguu (SEQ ID NO: 1648), CGGguguguc (SEQ ID NO: 1649), CGGgugugug (SEQ ID NO: 1650), CGGguguguu (SEQ ID NO: 1651), CGGguucaag (SEQ ID NO: 1652), CGGguucaug (SEQ ID NO: 1653), CGGguuugcu (SEQ ID NO: 1654), CGUguagggu (SEQ ID NO: 1655), CGUguaugca (SEQ ID NO: 1656), CGUguaugua (SEQ ID NO: 1657), CGUgucugua (SEQ ID NO: 1658), CGUgugagug (SEQ ID NO: 1659), CGUguuuucu (SEQ ID NO: 1660), CUAguaaaug (SEQ ID NO: 1661), CUAguaagcg (SEQ ID NO: 1662), CUAguaagcu (SEQ ID NO: 1663), CUAguaagua (SEQ ID NO: 1664), CUAguaaguc (SEQ ID NO: 1665), CUAguaagug (SEQ ID NO: 1666), CUAguaaguu (SEQ ID NO: 1667), CUAguaauuu (SEQ ID NO: 1668), CUAguaggua (SEQ ID NO: 1669), CUAguagguu (SEQ ID NO: 1670), CUAguaugua (SEQ ID NO: 1671), CUAguauguu (SEQ ID NO: 1672), CUAgugagua (SEQ ID NO: 1673), CUCguaagca (SEQ ID NO: 1674), CUCguaagug (SEQ ID NO: 1675), CUCguaaguu (SEQ ID NO: 1676), CUCguaucug (SEQ ID NO: 1677), CUCgucugug (SEQ ID NO: 1678), CUCgugaaua (SEQ ID NO: 1679), CUCgugagua (SEQ ID NO: 1680), CUCgugauua (SEQ ID NO: 1681), CUGguaaaaa (SEQ ID NO: 1682), CUGguaaaau (SEQ ID NO: 1683), CUGguaaacc (SEQ ID NO: 1684), CUGguaaacg (SEQ ID NO: 1685), CUGguaaagc (SEQ ID NO: 1686), CUGguaaaua (SEQ ID NO: 1687), CUGguaaauc (SEQ ID NO: 1688), CUGguaaaug (SEQ ID NO: 1689), CUGguaaauu (SEQ ID NO: 1690), CUGguaacac (SEQ ID NO: 1691), CUGguaacag (SEQ ID NO: 1692), CUGguaaccc (SEQ ID NO: 1693), CUGguaaccg (SEQ ID NO: 1694), CUGguaacug (SEQ ID NO: 1695), CUGguaacuu (SEQ ID NO: 1696), CUGguaagaa (SEQ ID NO: 1697), CUGguaagag (SEQ ID NO: 1698), CUGguaagau (SEQ ID NO: 1699), CUGguaagca (SEQ ID NO: 1700), CUGguaagcc (SEQ ID NO: 1701), CUGguaagcu (SEQ ID NO: 1702), CUGguaagga (SEQ ID NO: 1703), CUGguaaggc (SEQ ID NO: 1704), CUGguaaggg (SEQ ID NO: 1705), CUGguaaggu (SEQ ID NO: 1706), CUGguaagua (SEQ ID NO: 1707), CUGguaagug (SEQ ID NO: 1708), CUGguaaguu (SEQ ID NO: 1709), CUGguaauga (SEQ ID NO: 1710), CUGguaaugc (SEQ ID NO: 1711), CUGguaauuc (SEQ ID NO: 1712), CUGguaauuu (SEQ ID NO: 1713), CUGguacaac (SEQ ID NO: 1714), CUGguacaau (SEQ ID NO: 1715), CUGguacaga (SEQ ID NO: 1716), CUGguacaua (SEQ ID NO: 1717), CUGguacauu (SEQ ID NO: 1718), CUGguaccau (SEQ ID NO: 1719), CUGguacguu (SEQ ID NO: 1720), CUGguacuaa (SEQ ID NO: 1721), CUGguacuug (SEQ ID NO: 1722), CUGguacuuu (SEQ ID NO: 1723), CUGguagaga (SEQ ID NO: 1724), CUGguagaua (SEQ ID NO: 1725), CUGguagcgu (SEQ ID NO: 1726), CUGguaggau (SEQ ID NO: 1727), CUGguaggca (SEQ ID NO: 1728), CUGguaggua (SEQ ID NO: 1729), CUGguagguc (SEQ ID NO: 1730), CUGguaggug (SEQ ID NO: 1731), CUGguaucaa (SEQ ID NO: 1732), CUGguaugau (SEQ ID NO: 1733), CUGguauggc (SEQ ID NO: 1734), CUGguauggu (SEQ ID NO: 1735), CUGguaugua (SEQ ID NO: 1736), CUGguaugug (SEQ ID NO: 1737), CUGguauguu (SEQ ID NO: 1738), CUGguauuga (SEQ ID NO: 1739), CUGguauuuc (SEQ ID NO: 1740), CUGguauuuu (SEQ ID NO: 1741), CUGgucaaca (SEQ ID NO: 1742), CUGgucagag (SEQ ID NO: 1743), CUGgucccgc (SEQ ID NO: 1744), CUGgucggua (SEQ ID NO: 1745), CUGgucuggg (SEQ ID NO: 1746), CUGgugaagu (SEQ ID NO: 1747), CUGgugaaua (SEQ ID NO: 1748), CUGgugaauu (SEQ ID NO: 1749), CUGgugacua (SEQ ID NO: 1750), CUGgugagaa (SEQ ID NO: 1751), CUGgugagac (SEQ ID NO: 1752), CUGgugagca (SEQ ID NO: 1753), CUGgugagcu (SEQ ID NO: 1754), CUGgugagga (SEQ ID NO: 1755), CUGgugaggc (SEQ ID NO: 1756), CUGgugaggg (SEQ ID NO: 1757), CUGgugaggu (SEQ ID NO: 1758), CUGgugagua (SEQ ID NO: 1759), CUGgugaguc (SEQ ID NO: 1760), CUGgugagug (SEQ ID NO: 1761), CUGgugaguu (SEQ ID NO: 1762), CUGgugauua (SEQ ID NO: 1763), CUGgugauuu (SEQ ID NO: 1764), CUGgugcaga (SEQ ID NO: 1765), CUGgugcgcu (SEQ ID NO: 1766), CUGgugegug (SEQ ID NO: 1767), CUGgugcuga (SEQ ID NO: 1768), CUGgugggag (SEQ ID NO: 1769), CUGgugggga (SEQ ID NO: 1770), CUGgugggua (SEQ ID NO: 1771), CUGguggguc (SEQ ID NO: 1772), CUGgugggug (SEQ ID NO: 1773), CUGguggguu (SEQ ID NO: 1774), CUGgugugaa (SEQ ID NO: 1775), CUGgugugca (SEQ ID NO: 1776), CUGgugugcu (SEQ ID NO: 1777), CUGguguggu (SEQ ID NO: 1778), CUGgugugug (SEQ ID NO: 1779), CUGguguguu (SEQ ID NO: 1780), CUGguuagcu (SEQ ID NO: 1781), CUGguuagug (SEQ ID NO: 1782), CUGguucgug (SEQ ID NO: 1783), CUGguuggcu (SEQ ID NO: 1784), CUGguuguuu (SEQ ID NO: 1785), CUGguuugua (SEQ ID NO: 1786), CUGguuuguc (SEQ ID NO: 1787), CUGguuugug (SEQ ID NO: 1788), CUUguaaaug (SEQ ID NO: 1789), CUUguaagcu (SEQ ID NO: 1790), CUUguaagga (SEQ ID NO: 1791), CUUguaaggc (SEQ ID NO: 1792), CUUguaagua (SEQ ID NO: 1793), CUUguaagug (SEQ ID NO: 1794), CUUguaaguu (SEQ ID NO: 1795), CUUguacguc (SEQ ID NO: 1796), CUUguacgug (SEQ ID NO: 1797), CUUguaggua (SEQ ID NO: 1798), CUUguagugc (SEQ ID NO: 1799), CUUguauagg (SEQ ID NO: 1800), CUUgucagua (SEQ ID NO: 1801), CUUgugagua (SEQ ID NO: 1802), CUUgugaguc (SEQ ID NO: 1803), CUUgugaguu (SEQ ID NO: 1804), CUUguggguu (SEQ ID NO: 1805), CUUgugugua (SEQ ID NO: 1806), CUUguuagug (SEQ ID NO: 1807), CUUguuugag (SEQ ID NO: 1808), GAAguaaaac (SEQ ID NO: 1809), GAAguaaagc (SEQ ID NO: 1810), GAAguaaagu (SEQ ID NO: 1811), GAAguaaaua (SEQ ID NO: 1812), GAAguaaauu (SEQ ID NO: 1813), GAAguaagaa (SEQ ID NO: 1814), GAAguaagcc (SEQ ID NO: 1815), GAAguaagcu (SEQ ID NO: 1816), GAAguaagga (SEQ ID NO: 1817), GAAguaagua (SEQ ID NO: 1818), GAAguaagug (SEQ ID NO: 1819), GAAguaaguu (SEQ ID NO: 1820), GAAguaauau (SEQ ID NO: 1821), GAAguaaugc (SEQ ID NO: 1822), GAAguaauua (SEQ ID NO: 1823), GAAguaauuu (SEQ ID NO: 1824), GAAguaccau (SEQ ID NO: 1825), GAAguacgua (SEQ ID NO: 1826), GAAguacguc (SEQ ID NO: 1827), GAAguaggca (SEQ ID NO: 1828), GAAguagguc (SEQ ID NO: 1829), GAAguauaaa (SEQ ID NO: 1830), GAAguaugcu (SEQ ID NO: 1831), GAAguaugug (SEQ ID NO: 1832), GAAguauguu (SEQ ID NO: 1833), GAAguauuaa (SEQ ID NO: 1834), GAAgucagug (SEQ ID NO: 1835), GAAgugagag (SEQ ID NO: 1836), GAAgugagcg (SEQ ID NO: 1837), GAAgugaggu (SEQ ID NO: 1838), GAAgugaguc (SEQ ID NO: 1839), GAAgugagug (SEQ ID NO: 1840), GAAgugaguu (SEQ ID NO: 1841), GAAgugauaa (SEQ ID NO: 1842), GAAgugauuc (SEQ ID NO: 1843), GAAgugcgug (SEQ ID NO: 1844), GAAguguggg (SEQ ID NO: 1845), GAAguguguc (SEQ ID NO: 1846), GAAguuggug (SEQ ID NO: 1847), GACguaaagu (SEQ ID NO: 1848), GACguaagcu (SEQ ID NO: 1849), GACguaagua (SEQ ID NO: 1850), GACguaaugg (SEQ ID NO: 1851), GACguaugcc (SEQ ID NO: 1852), GACguauguu (SEQ ID NO: 1853), GACgugagcc (SEQ ID NO: 1854), GACgugagug (SEQ ID NO: 1855), GAGgcaaaug (SEQ ID NO: 1856), GAGgcaagag (SEQ ID NO: 1857), GAGgcaagua (SEQ ID NO: 1858), GAGgcaagug (SEQ ID NO: 1859), GAGgcaaguu (SEQ ID NO: 1860), GAGgcacgag (SEQ ID NO: 1861), GAGgcaggga (SEQ ID NO: 1862), GAGgcaugug (SEQ ID NO: 1863), GAGgcgaagg (SEQ ID NO: 1864), GAGguaaaaa (SEQ ID NO: 1865), GAGguaaaac (SEQ ID NO: 1866), GAGguaaaag (SEQ ID NO: 1867), GAGguaaaau (SEQ ID NO: 1868), GAGguaaacc (SEQ ID NO: 1869), GAGguaaaga (SEQ ID NO: 1870), GAGguaaagc (SEQ ID NO: 1871), GAGguaaagu (SEQ ID NO: 1872), GAGguaaaua (SEQ ID NO: 1873), GAGguaaauc (SEQ ID NO: 1874), GAGguaaaug (SEQ ID NO: 1875), GAGguaaauu (SEQ ID NO: 1876), GAGguaacaa (SEQ ID NO: 1877), GAGguaacag (SEQ ID NO: 1878), GAGguaacca (SEQ ID NO: 1879), GAGguaaccu (SEQ ID NO: 1880), GAGguaacuu (SEQ ID NO: 1881), GAGguaagaa (SEQ ID NO: 1882), GAGguaagag (SEQ ID NO: 1883), GAGguaagau (SEQ ID NO: 1884), GAGguaagca (SEQ ID NO: 1885), GAGguaagcc (SEQ ID NO: 1886), GAGguaagcg (SEQ ID NO: 1887), GAGguaagcu (SEQ ID NO: 1888), GAGguaagga (SEQ ID NO: 1889), GAGguaaggc (SEQ ID NO: 1890), GAGguaaggg (SEQ ID NO: 1891), GAGguaaggu (SEQ ID NO: 1892), GAGguaagua (SEQ ID NO: 1893), GAGguaaguc (SEQ ID NO: 1894), GAGguaauaa (SEQ ID NO: 1895), GAGguaauac (SEQ ID NO: 1896), GAGguaauau (SEQ ID NO: 1897), GAGguaauca (SEQ ID NO: 1898), GAGguaaucu (SEQ ID NO: 1899), GAGguaaugg (SEQ ID NO: 1900), GAGguaaugu (SEQ ID NO: 1901), GAGguaauug (SEQ ID NO: 1902), GAGguaauuu (SEQ ID NO: 1903), GAGguacaaa (SEQ ID NO: 1904), GAGguacaac (SEQ ID NO: 1905), GAGguacaga (SEQ ID NO: 1906), GAGguacagc (SEQ ID NO: 1907), GAGguacagu (SEQ ID NO: 1908), GAGguacaua (SEQ ID NO: 1909), GAGguacauu (SEQ ID NO: 1910), GAGguaccag (SEQ ID NO: 1911), GAGguaccga (SEQ ID NO: 1912), GAGguaccug (SEQ ID NO: 1913), GAGguaccuu (SEQ ID NO: 1914), GAGguacuag (SEQ ID NO: 1915), GAGguacuau (SEQ ID NO: 1916), GAGguacucc (SEQ ID NO: 1917), GAGguacugc (SEQ ID NO: 1918), GAGguacugg (SEQ ID NO: 1919), GAGguacugu (SEQ ID NO: 1920), GAGguacuug (SEQ ID NO: 1921), GAGguacuuu (SEQ ID NO: 1922), GAGguagaag (SEQ ID NO: 1923), GAGguagaga (SEQ ID NO: 1924), GAGguagagg (SEQ ID NO: 1925), GAGguagagu (SEQ ID NO: 1926), GAGguagauc (SEQ ID NO: 1927), GAGguagcua (SEQ ID NO: 1928), GAGguagcug (SEQ ID NO: 1929), GAGguaggaa (SEQ ID NO: 1930), GAGguaggag (SEQ ID NO: 1931), GAGguaggca (SEQ ID NO: 1932), GAGguaggcu (SEQ ID NO: 1933), GAGguaggga (SEQ ID NO: 1934), GAGguagggc (SEQ ID NO: 1935), GAGguagggg (SEQ ID NO: 1936), GAGguaggua (SEQ ID NO: 1937), GAGguaggug (SEQ ID NO: 1938), GAGguagguu (SEQ ID NO: 1939), GAGguaguaa (SEQ ID NO: 1940), GAGguaguag (SEQ ID NO: 1941), GAGguaguau (SEQ ID NO: 1942), GAGguagucu (SEQ ID NO: 1943), GAGguagugc (SEQ ID NO: 1944), GAGguagugg (SEQ ID NO: 1945), GAGguaguua (SEQ ID NO: 1946), GAGguaguug (SEQ ID NO: 1947), GAGguauaag (SEQ ID NO: 1948), GAGguauacu (SEQ ID NO: 1949), GAGguauagc (SEQ ID NO: 1950), GAGguauaug (SEQ ID NO: 1951), GAGguauauu (SEQ ID NO: 1952), GAGguaucau (SEQ ID NO: 1953), GAGguaucug (SEQ ID NO: 1954), GAGguaucuu (SEQ ID NO: 1955), GAGguaugaa (SEQ ID NO: 1956), GAGguaugac (SEQ ID NO: 1957), GAGguaugag (SEQ ID NO: 1958), GAGguaugcc (SEQ ID NO: 1959), GAGguaugcg (SEQ ID NO: 1960), GAGguaugcu (SEQ ID NO: 1961), GAGguaugga (SEQ ID NO: 1962), GAGguauggg (SEQ ID NO: 1963), GAGguauggu (SEQ ID NO: 1964), GAGguaugua (SEQ ID NO: 1965), GAGguauguc (SEQ ID NO: 1966), GAGguaugug (SEQ ID NO: 1967), GAGguauguu (SEQ ID NO: 1968), GAGguauucc (SEQ ID NO: 1969), GAGguauuga (SEQ ID NO: 1970), GAGguauugu (SEQ ID NO: 1971), GAGguauuua (SEQ ID NO: 1972), GAGguauuuc (SEQ ID NO: 1973), GAGguauuug (SEQ ID NO: 1974), GAGguauuuu (SEQ ID NO: 1975), GAGgucaaca (SEQ ID NO: 1976), GAGgucaagg (SEQ ID NO: 1977), GAGgucaaug (SEQ ID NO: 1978), GAGgucacug (SEQ ID NO: 1979), GAGgucagaa (SEQ ID NO: 1980), GAGgucagag (SEQ ID NO: 1981), GAGgucagcu (SEQ ID NO: 1982), GAGgucagga (SEQ ID NO: 1983), GAGgucaggc (SEQ ID NO: 1984), GAGgucaggg (SEQ ID NO: 1985), GAGgucaggu (SEQ ID NO: 1986), GAGgucagua (SEQ ID NO: 1987), GAGgucauau (SEQ ID NO: 1988), GAGgucaugu (SEQ ID NO: 1989), GAGgucauuu (SEQ ID NO: 1990), GAGguccaua (SEQ ID NO: 1991), GAGguccauc (SEQ ID NO: 1992), GAGguccggg (SEQ ID NO: 1993), GAGguccggu (SEQ ID NO: 1994), GAGguccuug (SEQ ID NO: 1995), GAGgucgggg (SEQ ID NO: 1996), GAGgucucgu (SEQ ID NO: 1997), GAGgucugag (SEQ ID NO: 1998), GAGgucuggu (SEQ ID NO: 1999), GAGgucuguc (SEQ ID NO: 2000), GAGgucuguu (SEQ ID NO: 2001), GAGgucuuuu (SEQ ID NO: 2002), GAGgugaaaa (SEQ ID NO: 2003), GAGgugaaau (SEQ ID NO: 2004), GAGgugaaca (SEQ ID NO: 2005), GAGgugaagg (SEQ ID NO: 2006), GAGgugaaua (SEQ ID NO: 2007), GAGgugaauu (SEQ ID NO: 2008), GAGgugacau (SEQ ID NO: 2009), GAGgugacca (SEQ ID NO: 2010), GAGgugaccu (SEQ ID NO: 2011), GAGgugacua (SEQ ID NO: 2012), GAGgugacuu (SEQ ID NO: 2013), GAGgugagaa (SEQ ID NO: 2014), GAGgugagac (SEQ ID NO: 2015), GAGgugagag (SEQ ID NO: 2016), GAGgugagau (SEQ ID NO: 2017), GAGgugagca (SEQ ID NO: 2018), GAGgugagcc (SEQ ID NO: 2019), GAGgugagcg (SEQ ID NO: 2020), GAGgugagcu (SEQ ID NO: 2021), GAGgugagga (SEQ ID NO: 2022), GAGgugaggc (SEQ ID NO: 2023), GAGgugaggg (SEQ ID NO: 2024), GAGgugagua (SEQ ID NO: 2025), GAGgugagug (SEQ ID NO: 2026), GAGgugaguu (SEQ ID NO: 2027), GAGgugauau (SEQ ID NO: 2028), GAGgugaucc (SEQ ID NO: 2029), GAGgugaucu (SEQ ID NO: 2030), GAGgugauga (SEQ ID NO: 2031), GAGgugaugg (SEQ ID NO: 2032), GAGgugaugu (SEQ ID NO: 2033), GAGgugauuc (SEQ ID NO: 2034), GAGgugcaca (SEQ ID NO: 2035), GAGgugcaga (SEQ ID NO: 2036), GAGgugcagc (SEQ ID NO: 2037), GAGgugcagg (SEQ ID NO: 2038), GAGgugccag (SEQ ID NO: 2039), GAGgugccca (SEQ ID NO: 2040), GAGgugccuu (SEQ ID NO: 2041), GAGgugcggg (SEQ ID NO: 2042), GAGgugcgug (SEQ ID NO: 2043), GAGgugcucc (SEQ ID NO: 2044), GAGgugcugg (SEQ ID NO: 2045), GAGgugcuua (SEQ ID NO: 2046), GAGgugcuug (SEQ ID NO: 2047), GAGguggaaa (SEQ ID NO: 2048), GAGguggaau (SEQ ID NO: 2049), GAGguggacc (SEQ ID NO: 2050), GAGguggacg (SEQ ID NO: 2051), GAGguggagg (SEQ ID NO: 2052), GAGguggcug (SEQ ID NO: 2053), GAGgugggaa (SEQ ID NO: 2054), GAGgugggag (SEQ ID NO: 2055), GAGgugggau (SEQ ID NO: 2056), GAGgugggca (SEQ ID NO: 2057), GAGgugggcg (SEQ ID NO: 2058), GAGgugggcu (SEQ ID NO: 2059), GAGgugggga (SEQ ID NO: 2060), GAGguggggc (SEQ ID NO: 2061), GAGguggggg (SEQ ID NO: 2062), GAGgugggua (SEQ ID NO: 2063), GAGguggguc (SEQ ID NO: 2064), GAGgugggug (SEQ ID NO: 2065), GAGguggguu (SEQ ID NO: 2066), GAGgugguau (SEQ ID NO: 2067), GAGgugguuc (SEQ ID NO: 2068), GAGgugucau (SEQ ID NO: 2069), GAGgugugag (SEQ ID NO: 2070), GAGgugugau (SEQ ID NO: 2071), GAGgugugca (SEQ ID NO: 2072), GAGgugugcu (SEQ ID NO: 2073), GAGgugugga (SEQ ID NO: 2074), GAGguguggg (SEQ ID NO: 2075), GAGguguggu (SEQ ID NO: 2076), GAGgugugua (SEQ ID NO: 2077), GAGgugugug (SEQ ID NO: 2078), GAGguuaaau (SEQ ID NO: 2079), GAGguuaaga (SEQ ID NO: 2080), GAGguuaaua (SEQ ID NO: 2081), GAGguuaccg (SEQ ID NO: 2082), GAGguuagaa (SEQ ID NO: 2083), GAGguuagac (SEQ ID NO: 2084), GAGguuagag (SEQ ID NO: 2085), GAGguuaggu (SEQ ID NO: 2086), GAGguuagua (SEQ ID NO: 2087), GAGguuaguc (SEQ ID NO: 2088), GAGguuagug (SEQ ID NO: 2089), GAGguuaguu (SEQ ID NO: 2090), GAGguuaugu (SEQ ID NO: 2091), GAGguuauuc (SEQ ID NO: 2092), GAGguucaaa (SEQ ID NO: 2093), GAGguucaua (SEQ ID NO: 2094), GAGguucuga (SEQ ID NO: 2095), GAGguugaag (SEQ ID NO: 2096), GAGguugcag (SEQ ID NO: 2097), GAGguugcug (SEQ ID NO: 2098), GAGguuggaa (SEQ ID NO: 2099), GAGguuggag (SEQ ID NO: 2100), GAGguuggau (SEQ ID NO: 2101), GAGguuggua (SEQ ID NO: 2102), GAGguugguc (SEQ ID NO: 2103), GAGguugguu (SEQ ID NO: 2104), GAGguuguag (SEQ ID NO: 2105), GAGguuucug (SEQ ID NO: 2106), GAGguuugag (SEQ ID NO: 2107), GAGguuugga (SEQ ID NO: 2108), GAGguuuggg (SEQ ID NO: 2109), GAGguuugua (SEQ ID NO: 2110), GAGguuuguu (SEQ ID NO: 2111), GAGguuuuca (SEQ ID NO: 2112), GAGguuuuga (SEQ ID NO: 2113), GAGguuuugg (SEQ ID NO: 2114), GAGguuuuua (SEQ ID NO: 2115), GAGguuuuuc (SEQ ID NO: 2116), GAUguaaaau (SEQ ID NO: 2117), GAUguaagca (SEQ ID NO: 2118), GAUguaagcc (SEQ ID NO: 2119), GAUguaaggu (SEQ ID NO: 2120), GAUguaagua (SEQ ID NO: 2121), GAUguaagug (SEQ ID NO: 2122), GAUguaaguu (SEQ ID NO: 2123), GAUguacauc (SEQ ID NO: 2124), GAUguaggua (SEQ ID NO: 2125), GAUguauggc (SEQ ID NO: 2126), GAUguaugua (SEQ ID NO: 2127), GAUguauguu (SEQ ID NO: 2128), GAUgucagug (SEQ ID NO: 2129), GAUgugagag (SEQ ID NO: 2130), GAUgugagcc (SEQ ID NO: 2131), GAUgugagcu (SEQ ID NO: 2132), GAUgugagga (SEQ ID NO: 2133), GAUgugaguc (SEQ ID NO: 2134), GAUgugagug (SEQ ID NO: 2135), GAUgugaguu (SEQ ID NO: 2136), GAUgugggua (SEQ ID NO: 2137), GAUgugggug (SEQ ID NO: 2138), GAUguguguu (SEQ ID NO: 2139), GAUguuagcu (SEQ ID NO: 2140), GAUguucagu (SEQ ID NO: 2141), GAUguucgug (SEQ ID NO: 2142), GAUguuuguu (SEQ ID NO: 2143), GCAguaaagg (SEQ ID NO: 2144), GCAguaagaa (SEQ ID NO: 2145), GCAguaagga (SEQ ID NO: 2146), GCAguaagua (SEQ ID NO: 2147), GCAguaaguc (SEQ ID NO: 2148), GCAguaaguu (SEQ ID NO: 2149), GCAguagaug (SEQ ID NO: 2150), GCAguaggua (SEQ ID NO: 2151), GCAguaugug (SEQ ID NO: 2152), GCAguauguu (SEQ ID NO: 2153), GCAgucagua (SEQ ID NO: 2154), GCAgucagug (SEQ ID NO: 2155), GCAguccggu (SEQ ID NO: 2156), GCAgugacuu (SEQ ID NO: 2157), GCAgugagcc (SEQ ID NO: 2158), GCAgugagcg (SEQ ID NO: 2159), GCAgugagcu (SEQ ID NO: 2160), GCAgugagua (SEQ ID NO: 2161), GCAgugagug (SEQ ID NO: 2162), GCAgugaguu (SEQ ID NO: 2163), GCAgugggua (SEQ ID NO: 2164), GCAguuaagu (SEQ ID NO: 2165), GCAguugagu (SEQ ID NO: 2166), GCCguaaguc (SEQ ID NO: 2167), GCCgugagua (SEQ ID NO: 2168), GCGguaaagc (SEQ ID NO: 2169), GCGguaaaua (SEQ ID NO: 2170), GCGguaagcu (SEQ ID NO: 2171), GCGguaaggg (SEQ ID NO: 2172), GCGguaagug (SEQ ID NO: 2173), GCGguaauca (SEQ ID NO: 2174), GCGguacgua (SEQ ID NO: 2175), GCGguacuug (SEQ ID NO: 2176), GCGguagggu (SEQ ID NO: 2177), GCGguagugu (SEQ ID NO: 2178), GCGgugagca (SEQ ID NO: 2179), GCGgugagcu (SEQ ID NO: 2180), GCGgugaguu (SEQ ID NO: 2181), GCGguggcuc (SEQ ID NO: 2182), GCGgugugca (SEQ ID NO: 2183), GCGguguguu (SEQ ID NO: 2184), GCGguuaagu (SEQ ID NO: 2185), GCGguuugca (SEQ ID NO: 2186), GCUgcuguaa (SEQ ID NO: 2187), GCUguaaaua (SEQ ID NO: 2188), GCUguaagac (SEQ ID NO: 2189), GCUguaagag (SEQ ID NO: 2190), GCUguaagca (SEQ ID NO: 2191), GCUguaagga (SEQ ID NO: 2192), GCUguaagua (SEQ ID NO: 2193), GCUguaaguc (SEQ ID NO: 2194), GCUguaagug (SEQ ID NO: 2195), GCUguaaguu (SEQ ID NO: 2196), GCUguaggug (SEQ ID NO: 2197), GCUguauggu (SEQ ID NO: 2198), GCUgucagug (SEQ ID NO: 2199), GCUguccuug (SEQ ID NO: 2200), GCUgugagaa (SEQ ID NO: 2201), GCUgugagcc (SEQ ID NO: 2202), GCUgugagga (SEQ ID NO: 2203), GCUgugagua (SEQ ID NO: 2204), GCUgugaguc (SEQ ID NO: 2205), GCUgugagug (SEQ ID NO: 2206), GCUgugaguu (SEQ ID NO: 2207), GCUguggguu (SEQ ID NO: 2208), GGAguaagag (SEQ ID NO: 2209), GGAguaagca (SEQ ID NO: 2210), GGAguaagcc (SEQ ID NO: 2211), GGAguaagcu (SEQ ID NO: 2212), GGAguaagga (SEQ ID NO: 2213), GGAguaagug (SEQ ID NO: 2214), GGAguaaguu (SEQ ID NO: 2215), GGAguaauuu (SEQ ID NO: 2216), GGAguacugu (SEQ ID NO: 2217), GGAguaggaa (SEQ ID NO: 2218), GGAguaggua (SEQ ID NO: 2219), GGAguagguu (SEQ ID NO: 2220), GGAguaguau (SEQ ID NO: 2221), GGAguaugac (SEQ ID NO: 2222), GGAguauggu (SEQ ID NO: 2223), GGAgucaagu (SEQ ID NO: 2224), GGAgugaggg (SEQ ID NO: 2225), GGAgugagua (SEQ ID NO: 2226), GGAgugaguc (SEQ ID NO: 2227), GGAgugagug (SEQ ID NO: 2228), GGAgugaguu (SEQ ID NO: 2229), GGAgugcuuu (SEQ ID NO: 2230), GGAgugggca (SEQ ID NO: 2231), GGAgugggug (SEQ ID NO: 2232), GGAguuaagg (SEQ ID NO: 2233), GGAguugaga (SEQ ID NO: 2234), GGCguaagcc (SEQ ID NO: 2235), GGCguaggua (SEQ ID NO: 2236), GGCguaggug (SEQ ID NO: 2237), GGCgugagcc (SEQ ID NO: 2238), GGCgugaguc (SEQ ID NO: 2239), GGGguaaaca (SEQ ID NO: 2240), GGGguaaacc (SEQ ID NO: 2241), GGGguaaacu (SEQ ID NO: 2242), GGGguaagaa (SEQ ID NO: 2243), GGGguaagag (SEQ ID NO: 2244), GGGguaagau (SEQ ID NO: 2245), GGGguaagca (SEQ ID NO: 2246), GGGguaagcc (SEQ ID NO: 2247), GGGguaagcu (SEQ ID NO: 2248), GGGguaagga (SEQ ID NO: 2249), GGGguaaggg (SEQ ID NO: 2250), GGGguaagua (SEQ ID NO: 2251), GGGguaagug (SEQ ID NO: 2252), GGGguaaguu (SEQ ID NO: 2253), GGGguagaca (SEQ ID NO: 2254), GGGguaggag (SEQ ID NO: 2255), GGGguaggcc (SEQ ID NO: 2256), GGGguaggga (SEQ ID NO: 2257), GGGguaggua (SEQ ID NO: 2258), GGGguaggug (SEQ ID NO: 2259), GGGguagguu (SEQ ID NO: 2260), GGGguagugc (SEQ ID NO: 2261), GGGguaucug (SEQ ID NO: 2262), GGGguaugac (SEQ ID NO: 2263), GGGguaugga (SEQ ID NO: 2264), GGGguaugua (SEQ ID NO: 2265), GGGguauguc (SEQ ID NO: 2266), GGGguaugug (SEQ ID NO: 2267), GGGguauguu (SEQ ID NO: 2268), GGGgucagua (SEQ ID NO: 2269), GGGguccgug (SEQ ID NO: 2270), GGGgucggag (SEQ ID NO: 2271), GGGgucugug (SEQ ID NO: 2272), GGGgugaaca (SEQ ID NO: 2273), GGGgugaaga (SEQ ID NO: 2274), GGGgugagaa (SEQ ID NO: 2275), GGGgugagau (SEQ ID NO: 2276), GGGgugagcc (SEQ ID NO: 2277), GGGgugagcg (SEQ ID NO: 2278), GGGgugagcu (SEQ ID NO: 2279), GGGgugagga (SEQ ID NO: 2280), GGGgugaggc (SEQ ID NO: 2281), GGGgugaggg (SEQ ID NO: 2282), GGGgugaguc (SEQ ID NO: 2283), GGGgugagug (SEQ ID NO: 2284), GGGgugaguu (SEQ ID NO: 2285), GGGgugcgua (SEQ ID NO: 2286), GGGguggggu (SEQ ID NO: 2287), GGGgugggua (SEQ ID NO: 2288), GGGgugggug (SEQ ID NO: 2289), GGGguggguu (SEQ ID NO: 2290), GGGgugugcg (SEQ ID NO: 2291), GGGgugugua (SEQ ID NO: 2292), GGGguguguc (SEQ ID NO: 2293), GGGgugugug (SEQ ID NO: 2294), GGGguuacag (SEQ ID NO: 2295), GGGguuggac (SEQ ID NO: 2296), GGGguuggga (SEQ ID NO: 2297), GGGguuugcc (SEQ ID NO: 2298), GGGguuugua (SEQ ID NO: 2299), GGUguaagaa (SEQ ID NO: 2300), GGUguaagau (SEQ ID NO: 2301), GGUguaagca (SEQ ID NO: 2302), GGUguaagcc (SEQ ID NO: 2303), GGUguaagcg (SEQ ID NO: 2304), GGUguaaguc (SEQ ID NO: 2305), GGUguaagug (SEQ ID NO: 2306), GGUguagguc (SEQ ID NO: 2307), GGUguaggug (SEQ ID NO: 2308), GGUguagguu (SEQ ID NO: 2309), GGUguccgua (SEQ ID NO: 2310), GGUgugagag (SEQ ID NO: 2311), GGUgugagcc (SEQ ID NO: 2312), GGUgugagcu (SEQ ID NO: 2313), GGUgugagua (SEQ ID NO: 2314), GGUgugaguc (SEQ ID NO: 2315), GGUgugcuuc (SEQ ID NO: 2316), GGUguggcug (SEQ ID NO: 2317), GGUgugguga (SEQ ID NO: 2318), GGUgugucug (SEQ ID NO: 2319), GGUguugaaa (SEQ ID NO: 2320), GGUguugcug (SEQ ID NO: 2321), GUAguaagau (SEQ ID NO: 2322), GUAguaagua (SEQ ID NO: 2323), GUAguaagug (SEQ ID NO: 2324), GUAguagcuu (SEQ ID NO: 2325), GUAguaggua (SEQ ID NO: 2326), GUAgucagua (SEQ ID NO: 2327), GUAgugagua (SEQ ID NO: 2328), GUAguggugg (SEQ ID NO: 2329), GUAguuaagu (SEQ ID NO: 2330), GUAguuucug (SEQ ID NO: 2331), GUCguaagug (SEQ ID NO: 2332), GUCgugagug (SEQ ID NO: 2333), GUCgugaguu (SEQ ID NO: 2334), GUGgcaagua (SEQ ID NO: 2335), GUGgcuugua (SEQ ID NO: 2336), GUGguaaaau (SEQ ID NO: 2337), GUGguaaaga (SEQ ID NO: 2338), GUGguaaauu (SEQ ID NO: 2339), GUGguaacau (SEQ ID NO: 2340), GUGguaacua (SEQ ID NO: 2341), GUGguaagaa (SEQ ID NO: 2342), GUGguaagac (SEQ ID NO: 2343), GUGguaagag (SEQ ID NO: 2344), GUGguaagau (SEQ ID NO: 2345), GUGguaagca (SEQ ID NO: 2346), GUGguaagcg (SEQ ID NO: 2347), GUGguaagcu (SEQ ID NO: 2348), GUGguaagga (SEQ ID NO: 2349), GUGguaaggc (SEQ ID NO: 2350), GUGguaagua (SEQ ID NO: 2351), GUGguaaguc (SEQ ID NO: 2352), GUGguaagug (SEQ ID NO: 2353), GUGguaaguu (SEQ ID NO: 2354), GUGguaauga (SEQ ID NO: 2355), GUGguaauuc (SEQ ID NO: 2356), GUGguaauuu (SEQ ID NO: 2357), GUGguacaug (SEQ ID NO: 2358), GUGguacgau (SEQ ID NO: 2359), GUGguacuau (SEQ ID NO: 2360), GUGguacuug (SEQ ID NO: 2361), GUGguagaua (SEQ ID NO: 2362), GUGguagege (SEQ ID NO: 2363), GUGguaggga (SEQ ID NO: 2364), GUGguagguc (SEQ ID NO: 2365), GUGguaggug (SEQ ID NO: 2366), GUGguagguu (SEQ ID NO: 2367), GUGguauaaa (SEQ ID NO: 2368), GUGguaucuc (SEQ ID NO: 2369), GUGguaugaa (SEQ ID NO: 2370), GUGguaugau (SEQ ID NO: 2371), GUGguaugca (SEQ ID NO: 2372), GUGguaugua (SEQ ID NO: 2373), GUGguauguu (SEQ ID NO: 2374), GUGguccgug (SEQ ID NO: 2375), GUGgucuggc (SEQ ID NO: 2376), GUGgugaaac (SEQ ID NO: 2377), GUGgugagaa (SEQ ID NO: 2378), GUGgugagau (SEQ ID NO: 2379), GUGgugagca (SEQ ID NO: 2380), GUGgugagcu (SEQ ID NO: 2381), GUGgugagga (SEQ ID NO: 2382), GUGgugagge (SEQ ID NO: 2383), GUGgugagug (SEQ ID NO: 2384), GUGgugaguu (SEQ ID NO: 2385), GUGgugauua (SEQ ID NO: 2386), GUGgugauuc (SEQ ID NO: 2387), GUGgugcgau (SEQ ID NO: 2388), GUGgugcuua (SEQ ID NO: 2389), GUGgugggaa (SEQ ID NO: 2390), GUGgugggua (SEQ ID NO: 2391), GUGguggguc (SEQ ID NO: 2392), GUGguguccg (SEQ ID NO: 2393), GUGguuagca (SEQ ID NO: 2394), GUGguuaggu (SEQ ID NO: 2395), GUGguuagug (SEQ ID NO: 2396), GUGguuugca (SEQ ID NO: 2397), GUGguuugua (SEQ ID NO: 2398), GUUguaaggu (SEQ ID NO: 2399), GUUguaagua (SEQ ID NO: 2400), GUUguaaguc (SEQ ID NO: 2401), GUUguaaguu (SEQ ID NO: 2402), GUUguaccac (SEQ ID NO: 2403), GUUguagcgu (SEQ ID NO: 2404), GUUguaugug (SEQ ID NO: 2405), GUUguauguu (SEQ ID NO: 2406), GUUgucugug (SEQ ID NO: 2407), GUUgugagcu (SEQ ID NO: 2408), GUUgugagug (SEQ ID NO: 2409), GUUgugaguu (SEQ ID NO: 2410), GUUgugggua (SEQ ID NO: 2411), GUUguggguu (SEQ ID NO: 2412), UAAguaaaug (SEQ ID NO: 2413), UAAguaacua (SEQ ID NO: 2414), UAAguaagaa (SEQ ID NO: 2415), UAAguaagag (SEQ ID NO: 2416), UAAguaagau (SEQ ID NO: 2417), UAAguaagca (SEQ ID NO: 2418), UAAguaagcu (SEQ ID NO: 2419), UAAguaagga (SEQ ID NO: 2420), UAAguaaggu (SEQ ID NO: 2421), UAAguaagua (SEQ ID NO: 2422), UAAguaaguc (SEQ ID NO: 2423), UAAguaagug (SEQ ID NO: 2424), UAAguaaguu (SEQ ID NO: 2425), UAAguaauaa (SEQ ID NO: 2426), UAAguacuag (SEQ ID NO: 2427), UAAguaguuu (SEQ ID NO: 2428), UAAguauaaa (SEQ ID NO: 2429), UAAguauaca (SEQ ID NO: 2430), UAAguaugua (SEQ ID NO: 2431), UAAguauuau (SEQ ID NO: 2432), UAAguauuuu (SEQ ID NO: 2433), UAAgucuuuu (SEQ ID NO: 2434), UAAgugagac (SEQ ID NO: 2435), UAAgugagga (SEQ ID NO: 2436), UAAgugaggg (SEQ ID NO: 2437), UAAgugagua (SEQ ID NO: 2438), UAAgugaguc (SEQ ID NO: 2439), UAAgugagug (SEQ ID NO: 2440), UAAgugaguu (SEQ ID NO: 2441), UAAgugaucc (SEQ ID NO: 2442), UAAgugauuc (SEQ ID NO: 2443), UAAgugcgug (SEQ ID NO: 2444), UAAguuaagu (SEQ ID NO: 2445), UAAguuccag (SEQ ID NO: 2446), UAAguucuuu (SEQ ID NO: 2447), UAAguuguaa (SEQ ID NO: 2448), UAAguuguau (SEQ ID NO: 2449), UAAguuuguu (SEQ ID NO: 2450), UACguaacug (SEQ ID NO: 2451), UACguaagaa (SEQ ID NO: 2452), UACguaagau (SEQ ID NO: 2453), UACguaagua (SEQ ID NO: 2454), UACguaagug (SEQ ID NO: 2455), UACguauccu (SEQ ID NO: 2456), UACgucuggc (SEQ ID NO: 2457), UACgugacca (SEQ ID NO: 2458), UAGgcaagac (SEQ ID NO: 2459), UAGgcaaguc (SEQ ID NO: 2460), UAGgcagguc (SEQ ID NO: 2461), UAGgcgugug (SEQ ID NO: 2462), UAGguaaaaa (SEQ ID NO: 2463), UAGguaaaac (SEQ ID NO: 2464), UAGguaaaag (SEQ ID NO: 2465), UAGguaaaau (SEQ ID NO: 2466), UAGguaaaca (SEQ ID NO: 2467), UAGguaaaga (SEQ ID NO: 2468), UAGguaaaua (SEQ ID NO: 2469), UAGguaaauc (SEQ ID NO: 2470), UAGguaaaug (SEQ ID NO: 2471), UAGguaaauu (SEQ ID NO: 2472), UAGguaacac (SEQ ID NO: 2473), UAGguaacag (SEQ ID NO: 2474), UAGguaacau (SEQ ID NO: 2475), UAGguaacca (SEQ ID NO: 2476), UAGguaacgg (SEQ ID NO: 2477), UAGguaacua (SEQ ID NO: 2478), UAGguaacuc (SEQ ID NO: 2479), UAGguaacug (SEQ ID NO: 2480), UAGguaacuu (SEQ ID NO: 2481), UAGguaagac (SEQ ID NO: 2482), UAGguaagag (SEQ ID NO: 2483), UAGguaagau (SEQ ID NO: 2484), UAGguaagca (SEQ ID NO: 2485), UAGguaagcc (SEQ ID NO: 2486), UAGguaagcu (SEQ ID NO: 2487), UAGguaagga (SEQ ID NO: 2488), UAGguaaggc (SEQ ID NO: 2489), UAGguaaggg (SEQ ID NO: 2490), UAGguaagua (SEQ ID NO: 2491), UAGguaaguc (SEQ ID NO: 2492), UAGguaagug (SEQ ID NO: 2493), UAGguaaguu (SEQ ID NO: 2494), UAGguaauag (SEQ ID NO: 2495), UAGguaauau (SEQ ID NO: 2496), UAGguaaucu (SEQ ID NO: 2497), UAGguaauga (SEQ ID NO: 2498), UAGguaaugg (SEQ ID NO: 2499), UAGguaaugu (SEQ ID NO: 2500), UAGguaauua (SEQ ID NO: 2501), UAGguaauuc (SEQ ID NO: 2502), UAGguaauuu (SEQ ID NO: 2503), UAGguacagc (SEQ ID NO: 2504), UAGguacagu (SEQ ID NO: 2505), UAGguacauu (SEQ ID NO: 2506), UAGguaccag (SEQ ID NO: 2507), UAGguaccua (SEQ ID NO: 2508), UAGguaccuu (SEQ ID NO: 2509), UAGguacgag (SEQ ID NO: 2510), UAGguacgua (SEQ ID NO: 2511), UAGguacguu (SEQ ID NO: 2512), UAGguacuau (SEQ ID NO: 2513), UAGguacuga (SEQ ID NO: 2514), UAGguacugg (SEQ ID NO: 2515), UAGguacuuc (SEQ ID NO: 2516), UAGguacuuu (SEQ ID NO: 2517), UAGguagcgg (SEQ ID NO: 2518), UAGguaggaa (SEQ ID NO: 2519), UAGguaggac (SEQ ID NO: 2520), UAGguaggau (SEQ ID NO: 2521), UAGguaggga (SEQ ID NO: 2522), UAGguagggg (SEQ ID NO: 2523), UAGguaggua (SEQ ID NO: 2524), UAGguagguc (SEQ ID NO: 2525), UAGguaggug (SEQ ID NO: 2526), UAGguagguu (SEQ ID NO: 2527), UAGguaguaa (SEQ ID NO: 2528), UAGguagucu (SEQ ID NO: 2529), UAGguagugg (SEQ ID NO: 2530), UAGguagugu (SEQ ID NO: 2531), UAGguaguuu (SEQ ID NO: 2532), UAGguauaaa (SEQ ID NO: 2533), UAGguauaac (SEQ ID NO: 2534), UAGguauaag (SEQ ID NO: 2535), UAGguauaau (SEQ ID NO: 2536), UAGguauaca (SEQ ID NO: 2537), UAGguauacu (SEQ ID NO: 2538), UAGguauaua (SEQ ID NO: 2539), UAGguauauc (SEQ ID NO: 2540), UAGguauauu (SEQ ID NO: 2541), UAGguaucag (SEQ ID NO: 2542), UAGguaucua (SEQ ID NO: 2543), UAGguaucuc (SEQ ID NO: 2544), UAGguaugaa (SEQ ID NO: 2545), UAGguaugag (SEQ ID NO: 2546), UAGguaugca (SEQ ID NO: 2547), UAGguaugga (SEQ ID NO: 2548), UAGguauggc (SEQ ID NO: 2549), UAGguauggu (SEQ ID NO: 2550), UAGguaugua (SEQ ID NO: 2551), UAGguauguc (SEQ ID NO: 2552), UAGguaugug (SEQ ID NO: 2553), UAGguauguu (SEQ ID NO: 2554), UAGguauuaa (SEQ ID NO: 2555), UAGguauuac (SEQ ID NO: 2556), UAGguauuau (SEQ ID NO: 2557), UAGguauuca (SEQ ID NO: 2558), UAGguauucc (SEQ ID NO: 2559), UAGguauucu (SEQ ID NO: 2560), UAGguauuga (SEQ ID NO: 2561), UAGguauuua (SEQ ID NO: 2562), UAGguauuuc (SEQ ID NO: 2563), UAGguauuuu (SEQ ID NO: 2564), UAGgucacuc (SEQ ID NO: 2565), UAGgucagcu (SEQ ID NO: 2566), UAGgucaggu (SEQ ID NO: 2567), UAGgucagua (SEQ ID NO: 2568), UAGgucagug (SEQ ID NO: 2569), UAGgucaguu (SEQ ID NO: 2570), UAGgucaucu (SEQ ID NO: 2571), UAGgucauug (SEQ ID NO: 2572), UAGguccaau (SEQ ID NO: 2573), UAGguccugu (SEQ ID NO: 2574), UAGgucucaa (SEQ ID NO: 2575), UAGgucucgc (SEQ ID NO: 2576), UAGgucuggc (SEQ ID NO: 2577), UAGgucuguc (SEQ ID NO: 2578), UAGgucugug (SEQ ID NO: 2579), UAGgugaagu (SEQ ID NO: 2580), UAGgugaaua (SEQ ID NO: 2581), UAGgugaaug (SEQ ID NO: 2582), UAGgugaauu (SEQ ID NO: 2583), UAGgugacau (SEQ ID NO: 2584), UAGgugacca (SEQ ID NO: 2585), UAGgugacua (SEQ ID NO: 2586), UAGgugagaa (SEQ ID NO: 2587), UAGgugagac (SEQ ID NO: 2588), UAGgugagag (SEQ ID NO: 2589), UAGgugagau (SEQ ID NO: 2590), UAGgugagcc (SEQ ID NO: 2591), UAGgugagcu (SEQ ID NO: 2592), UAGgugagga (SEQ ID NO: 2593), UAGgugaggc (SEQ ID NO: 2594), UAGgugaggu (SEQ ID NO: 2595), UAGgugagua (SEQ ID NO: 2596), UAGgugaguc (SEQ ID NO: 2597), UAGgugagug (SEQ ID NO: 2598), UAGgugauca (SEQ ID NO: 2599), UAGgugauuc (SEQ ID NO: 2600), UAGgugauuu (SEQ ID NO: 2601), UAGgugcaua (SEQ ID NO: 2602), UAGgugcauc (SEQ ID NO: 2603), UAGgugccgu (SEQ ID NO: 2604), UAGgugccug (SEQ ID NO: 2605), UAGgugcgca (SEQ ID NO: 2606), UAGgugcgua (SEQ ID NO: 2607), UAGgugcgug (SEQ ID NO: 2608), UAGgugcuga (SEQ ID NO: 2609), UAGguggaua (SEQ ID NO: 2610), UAGgugggaa (SEQ ID NO: 2611), UAGgugggac (SEQ ID NO: 2612), UAGgugggag (SEQ ID NO: 2613), UAGgugggau (SEQ ID NO: 2614), UAGgugggcc (SEQ ID NO: 2615), UAGgugggcu (SEQ ID NO: 2616), UAGguggguu (SEQ ID NO: 2617), UAGguggugu (SEQ ID NO: 2618), UAGguguaaa (SEQ ID NO: 2619), UAGgugugaa (SEQ ID NO: 2620), UAGgugugag (SEQ ID NO: 2621), UAGgugugca (SEQ ID NO: 2622), UAGgugugcc (SEQ ID NO: 2623), UAGgugugcg (SEQ ID NO: 2624), UAGguguggu (SEQ ID NO: 2625), UAGgugugua (SEQ ID NO: 2626), UAGgugugug (SEQ ID NO: 2627), UAGguguugg (SEQ ID NO: 2628), UAGguuaagc (SEQ ID NO: 2629), UAGguuagac (SEQ ID NO: 2630), UAGguuagcc (SEQ ID NO: 2631), UAGguuaggc (SEQ ID NO: 2632), UAGguuagua (SEQ ID NO: 2633), UAGguuaguc (SEQ ID NO: 2634), UAGguuagug (SEQ ID NO: 2635), UAGguucccc (SEQ ID NO: 2636), UAGguucuac (SEQ ID NO: 2637), UAGguuggua (SEQ ID NO: 2638), UAGguugguu (SEQ ID NO: 2639), UAGguugucc (SEQ ID NO: 2640), UAGguuuauu (SEQ ID NO: 2641), UAGguuugcc (SEQ ID NO: 2642), UAGguuugua (SEQ ID NO: 2643), UAGguuuguc (SEQ ID NO: 2644), UAGguuugug (SEQ ID NO: 2645), UAGguuuguu (SEQ ID NO: 2646), UAGguuuuuc (SEQ ID NO: 2647), UAGguuuuug (SEQ ID NO: 2648), UAUguaagaa (SEQ ID NO: 2649), UAUguaagau (SEQ ID NO: 2650), UAUguaagca (SEQ ID NO: 2651), UAUguaagcc (SEQ ID NO: 2652), UAUguaagua (SEQ ID NO: 2653), UAUguaaguc (SEQ ID NO: 2654), UAUguaagug (SEQ ID NO: 2655), UAUguaaguu (SEQ ID NO: 2656), UAUguacgug (SEQ ID NO: 2657), UAUguacguu (SEQ ID NO: 2658), UAUguagguc (SEQ ID NO: 2659), UAUguagguu (SEQ ID NO: 2660), UAUguauccu (SEQ ID NO: 2661), UAUguaucuc (SEQ ID NO: 2662), UAUguaugua (SEQ ID NO: 2663), UAUguauguc (SEQ ID NO: 2664), UAUguaugug (SEQ ID NO: 2665), UAUguauuau (SEQ ID NO: 2666), UAUgucagaa (SEQ ID NO: 2667), UAUgucugua (SEQ ID NO: 2668), UAUgugaaua (SEQ ID NO: 2669), UAUgugacag (SEQ ID NO: 2670), UAUgugagua (SEQ ID NO: 2671), UAUgugagug (SEQ ID NO: 2672), UAUgugaguu (SEQ ID NO: 2673), UAUgugggca (SEQ ID NO: 2674), UAUgugugua (SEQ ID NO: 2675), UAUguguuua (SEQ ID NO: 2676), UAUguuuugu (SEQ ID NO: 2677), UCAgcgacau (SEQ ID NO: 2678), UCAguaaaau (SEQ ID NO: 2679), UCAguaaaua (SEQ ID NO: 2680), UCAguaacug (SEQ ID NO: 2681), UCAguaagaa (SEQ ID NO: 2682), UCAguaagag (SEQ ID NO: 2683), UCAguaagau (SEQ ID NO: 2684), UCAguaagca (SEQ ID NO: 2685), UCAguaagcc (SEQ ID NO: 2686), UCAguaagcu (SEQ ID NO: 2687), UCAguaaggg (SEQ ID NO: 2688), UCAguaagua (SEQ ID NO: 2689), UCAguaaguc (SEQ ID NO: 2690), UCAguaagug (SEQ ID NO: 2691), UCAguaaguu (SEQ ID NO: 2692), UCAguaucuu (SEQ ID NO: 2693), UCAguaugga (SEQ ID NO: 2694), UCAguauggu (SEQ ID NO: 2695), UCAgucccca (SEQ ID NO: 2696), UCAgugagca (SEQ ID NO: 2697), UCAgugagcu (SEQ ID NO: 2698), UCAgugagua (SEQ ID NO: 2699), UCAgugagug (SEQ ID NO: 2700), UCAgugaguu (SEQ ID NO: 2701), UCAgugauug (SEQ ID NO: 2702), UCAgugggug (SEQ ID NO: 2703), UCAguugagc (SEQ ID NO: 2704), UCAguugauu (SEQ ID NO: 2705), UCAguuuagu (SEQ ID NO: 2706), UCCguaagca (SEQ ID NO: 2707), UCCguaagcu (SEQ ID NO: 2708), UCCguaaguc (SEQ ID NO: 2709), UCCguaagug (SEQ ID NO: 2710), UCCguaauag (SEQ ID NO: 2711), UCCguacuua (SEQ ID NO: 2712), UCCguaugua (SEQ ID NO: 2713), UCCguauguu (SEQ ID NO: 2714), UCCgugagau (SEQ ID NO: 2715), UCCgugaguc (SEQ ID NO: 2716), UCGguaaauu (SEQ ID NO: 2717), UCGguaagag (SEQ ID NO: 2718), UCGguaagcu (SEQ ID NO: 2719), UCGguacauc (SEQ ID NO: 2720), UCGguacucc (SEQ ID NO: 2721), UCGguagacc (SEQ ID NO: 2722), UCGguagguu (SEQ ID NO: 2723), UCGguaguaa (SEQ ID NO: 2724), UCGguaugug (SEQ ID NO: 2725), UCGguauguu (SEQ ID NO: 2726), UCGguauuga (SEQ ID NO: 2727), UCGgucagua (SEQ ID NO: 2728), UCGgucuuag (SEQ ID NO: 2729), UCGgugaagu (SEQ ID NO: 2730), UCGgugagaa (SEQ ID NO: 2731), UCGgugagca (SEQ ID NO: 2732), UCGgugaggc (SEQ ID NO: 2733), UCGgugagua (SEQ ID NO: 2734), UCGgugcgcu (SEQ ID NO: 2735), UCGgugcuuu (SEQ ID NO: 2736), UCGgugguuu (SEQ ID NO: 2737), UCGguuagcu (SEQ ID NO: 2738), UCUguaaaag (SEQ ID NO: 2739), UCUguaagaa (SEQ ID NO: 2740), UCUguaagau (SEQ ID NO: 2741), UCUguaagca (SEQ ID NO: 2742), UCUguaagcu (SEQ ID NO: 2743), UCUguaagua (SEQ ID NO: 2744), UCUguaaguc (SEQ ID NO: 2745), UCUguaagug (SEQ ID NO: 2746), UCUguaaguu (SEQ ID NO: 2747), UCUguaauaa (SEQ ID NO: 2748), UCUguaauga (SEQ ID NO: 2749), UCUguaaugu (SEQ ID NO: 2750), UCUguaggua (SEQ ID NO: 2751), UCUguagguu (SEQ ID NO: 2752), UCUguauaua (SEQ ID NO: 2753), UCUguaugac (SEQ ID NO: 2754), UCUguaugua (SEQ ID NO: 2755), UCUguccucg (SEQ ID NO: 2756), UCUgugagag (SEQ ID NO: 2757), UCUgugagcu (SEQ ID NO: 2758), UCUgugagga (SEQ ID NO: 2759), UCUgugagua (SEQ ID NO: 2760), UCUgugaguc (SEQ ID NO: 2761), UCUgugagug (SEQ ID NO: 2762), UCUgugaguu (SEQ ID NO: 2763), UCUgugcgua (SEQ ID NO: 2764), UCUgugugag (SEQ ID NO: 2765), UGAguaacuu (SEQ ID NO: 2766), UGAguaagau (SEQ ID NO: 2767), UGAguaagca (SEQ ID NO: 2768), UGAguaagcu (SEQ ID NO: 2769), UGAguaaggc (SEQ ID NO: 2770), UGAguaaggu (SEQ ID NO: 2771), UGAguaagua (SEQ ID NO: 2772), UGAguaaguc (SEQ ID NO: 2773), UGAguaagug (SEQ ID NO: 2774), UGAguaaguu (SEQ ID NO: 2775), UGAguaaucc (SEQ ID NO: 2776), UGAguaauua (SEQ ID NO: 2777), UGAguacagu (SEQ ID NO: 2778), UGAguacgua (SEQ ID NO: 2779), UGAguacguu (SEQ ID NO: 2780), UGAguacugu (SEQ ID NO: 2781), UGAguagcug (SEQ ID NO: 2782), UGAguaggua (SEQ ID NO: 2783), UGAguauaaa (SEQ ID NO: 2784), UGAguaugcu (SEQ ID NO: 2785), UGAguaugga (SEQ ID NO: 2786), UGAguaugua (SEQ ID NO: 2787), UGAguauguc (SEQ ID NO: 2788), UGAguauguu (SEQ ID NO: 2789), UGAgucagag (SEQ ID NO: 2790), UGAgucuacg (SEQ ID NO: 2791), UGAgugaaua (SEQ ID NO: 2792), UGAgugaauu (SEQ ID NO: 2793), UGAgugagaa (SEQ ID NO: 2794), UGAgugagau (SEQ ID NO: 2795), UGAgugagca (SEQ ID NO: 2796), UGAgugagcc (SEQ ID NO: 2797), UGAgugagga (SEQ ID NO: 2798), UGAgugagua (SEQ ID NO: 2799), UGAgugagug (SEQ ID NO: 2800), UGAgugaguu (SEQ ID NO: 2801), UGAgugggaa (SEQ ID NO: 2802), UGAguuaaga (SEQ ID NO: 2803), UGAguuaaug (SEQ ID NO: 2804), UGAguuacgg (SEQ ID NO: 2805), UGAguuaggu (SEQ ID NO: 2806), UGAguucuau (SEQ ID NO: 2807), UGAguugguu (SEQ ID NO: 2808), UGAguuguag (SEQ ID NO: 2809), UGAguuuauc (SEQ ID NO: 2810), UGCguaaguc (SEQ ID NO: 2811), UGCguaagug (SEQ ID NO: 2812), UGCguacggc (SEQ ID NO: 2813), UGCguacggg (SEQ ID NO: 2814), UGCguaugua (SEQ ID NO: 2815), UGGgcaaguc (SEQ ID NO: 2816), UGGgcaagug (SEQ ID NO: 2817), UGGgcacauc (SEQ ID NO: 2818), UGGgccacgu (SEQ ID NO: 2819), UGGgccccgg (SEQ ID NO: 2820), UGGguaaaau (SEQ ID NO: 2821), UGGguaaagc (SEQ ID NO: 2822), UGGguaaagg (SEQ ID NO: 2823), UGGguaaagu (SEQ ID NO: 2824), UGGguaaaua (SEQ ID NO: 2825), UGGguaaaug (SEQ ID NO: 2826), UGGguaaauu (SEQ ID NO: 2827), UGGguaacag (SEQ ID NO: 2828), UGGguaacau (SEQ ID NO: 2829), UGGguaacua (SEQ ID NO: 2830), UGGguaacuu (SEQ ID NO: 2831), UGGguaagaa (SEQ ID NO: 2832), UGGguaagac (SEQ ID NO: 2833), UGGguaagag (SEQ ID NO: 2834), UGGguaagau (SEQ ID NO: 2835), UGGguaagca (SEQ ID NO: 2836), UGGguaagcc (SEQ ID NO: 2837), UGGguaagcu (SEQ ID NO: 2838), UGGguaaggg (SEQ ID NO: 2839), UGGguaaggu (SEQ ID NO: 2840), UGGguaagua (SEQ ID NO: 2841), UGGguaaguc (SEQ ID NO: 2842), UGGguaagug (SEQ ID NO: 2843), UGGguaaguu (SEQ ID NO: 2844), UGGguaaugu (SEQ ID NO: 2845), UGGguaauua (SEQ ID NO: 2846), UGGguaauuu (SEQ ID NO: 2847), UGGguacaaa (SEQ ID NO: 2848), UGGguacagu (SEQ ID NO: 2849), UGGguacuac (SEQ ID NO: 2850), UGGguaggga (SEQ ID NO: 2851), UGGguagguc (SEQ ID NO: 2852), UGGguaggug (SEQ ID NO: 2853), UGGguagguu (SEQ ID NO: 2854), UGGguaguua (SEQ ID NO: 2855), UGGguauagu (SEQ ID NO: 2856), UGGguaugaa (SEQ ID NO: 2857), UGGguaugac (SEQ ID NO: 2858), UGGguaugag (SEQ ID NO: 2859), UGGguaugua (SEQ ID NO: 2860), UGGguauguc (SEQ ID NO: 2861), UGGguaugug (SEQ ID NO: 2862), UGGguauguu (SEQ ID NO: 2863), UGGguauuug (SEQ ID NO: 2864), UGGgucuuug (SEQ ID NO: 2865), UGGgugaccu (SEQ ID NO: 2866), UGGgugacua (SEQ ID NO: 2867), UGGgugagac (SEQ ID NO: 2868), UGGgugagag (SEQ ID NO: 2869), UGGgugagca (SEQ ID NO: 2870), UGGgugagcc (SEQ ID NO: 2871), UGGgugagga (SEQ ID NO: 2872), UGGgugaggc (SEQ ID NO: 2873), UGGgugaggg (SEQ ID NO: 2874), UGGgugagua (SEQ ID NO: 2875), UGGgugaguc (SEQ ID NO: 2876), UGGgugagug (SEQ ID NO: 2877), UGGgugaguu (SEQ ID NO: 2878), UGGgugcgug (SEQ ID NO: 2879), UGGguggagg (SEQ ID NO: 2880), UGGguggcuu (SEQ ID NO: 2881), UGGguggggg (SEQ ID NO: 2882), UGGgugggua (SEQ ID NO: 2883), UGGguggguc (SEQ ID NO: 2884), UGGgugggug (SEQ ID NO: 2885), UGGguggguu (SEQ ID NO: 2886), UGGgugugga (SEQ ID NO: 2887), UGGguguguc (SEQ ID NO: 2888), UGGgugugug (SEQ ID NO: 2889), UGGguguguu (SEQ ID NO: 2890), UGGguguuua (SEQ ID NO: 2891), UGGguuaaug (SEQ ID NO: 2892), UGGguuaguc (SEQ ID NO: 2893), UGGguuagug (SEQ ID NO: 2894), UGGguuaguu (SEQ ID NO: 2895), UGGguucaag (SEQ ID NO: 2896), UGGguucgua (SEQ ID NO: 2897), UGGguuggug (SEQ ID NO: 2898), UGGguuuaag (SEQ ID NO: 2899), UGGguuugua (SEQ ID NO: 2900), UGUgcaagua (SEQ ID NO: 2901), UGUguaaaua (SEQ ID NO: 2902), UGUguaagaa (SEQ ID NO: 2903), UGUguaagac (SEQ ID NO: 2904), UGUguaagag (SEQ ID NO: 2905), UGUguaaggu (SEQ ID NO: 2906), UGUguaagua (SEQ ID NO: 2907), UGUguaaguc (SEQ ID NO: 2908), UGUguaaguu (SEQ ID NO: 2909), UGUguacuuc (SEQ ID NO: 2910), UGUguaggeg (SEQ ID NO: 2911), UGUguaggua (SEQ ID NO: 2912), UGUguaguua (SEQ ID NO: 2913), UGUguaugug (SEQ ID NO: 2914), UGUgucagua (SEQ ID NO: 2915), UGUgucugua (SEQ ID NO: 2916), UGUgucuguc (SEQ ID NO: 2917), UGUgugaccc (SEQ ID NO: 2918), UGUgugagau (SEQ ID NO: 2919), UGUgugagca (SEQ ID NO: 2920), UGUgugagcc (SEQ ID NO: 2921), UGUgugagua (SEQ ID NO: 2922), UGUgugaguc (SEQ ID NO: 2923), UGUgugagug (SEQ ID NO: 2924), UGUgugcgug (SEQ ID NO: 2925), UGUgugggug (SEQ ID NO: 2926), UGUguggguu (SEQ ID NO: 2927), UGUgugugag (SEQ ID NO: 2928), UGUguguucu (SEQ ID NO: 2929), UGUguuuaga (SEQ ID NO: 2930), UUAguaaaua (SEQ ID NO: 2931), UUAguaagaa (SEQ ID NO: 2932), UUAguaagua (SEQ ID NO: 2933), UUAguaagug (SEQ ID NO: 2934), UUAguaaguu (SEQ ID NO: 2935), UUAguaggug (SEQ ID NO: 2936), UUAgugagca (SEQ ID NO: 2937), UUAgugaguu (SEQ ID NO: 2938), UUAguuaagu (SEQ ID NO: 2939), UUCguaaguc (SEQ ID NO: 2940), UUCguaaguu (SEQ ID NO: 2941), UUCguaauua (SEQ ID NO: 2942), UUCgugagua (SEQ ID NO: 2943), UUCgugaguu (SEQ ID NO: 2944), UUGgcaagug (SEQ ID NO: 2945), UUGgccgagu (SEQ ID NO: 2946), UUGguaaaaa (SEQ ID NO: 2947), UUGguaaaau (SEQ ID NO: 2948), UUGguaaaga (SEQ ID NO: 2949), UUGguaaagg (SEQ ID NO: 2950), UUGguaaagu (SEQ ID NO: 2951), UUGguaaauc (SEQ ID NO: 2952), UUGguaaaug (SEQ ID NO: 2953), UUGguaaauu (SEQ ID NO: 2954), UUGguaacug (SEQ ID NO: 2955), UUGguaacuu (SEQ ID NO: 2956), UUGguaagaa (SEQ ID NO: 2957), UUGguaagag (SEQ ID NO: 2958), UUGguaagcu (SEQ ID NO: 2959), UUGguaagga (SEQ ID NO: 2960), UUGguaaggg (SEQ ID NO: 2961), UUGguaagua (SEQ ID NO: 2962), UUGguaagug (SEQ ID NO: 2963), UUGguaaguu (SEQ ID NO: 2964), UUGguaauac (SEQ ID NO: 2965), UUGguaauca (SEQ ID NO: 2966), UUGguaaugc (SEQ ID NO: 2967), UUGguaaugu (SEQ ID NO: 2968), UUGguaauug (SEQ ID NO: 2969), UUGguaauuu (SEQ ID NO: 2970), UUGguacaua (SEQ ID NO: 2971), UUGguacgug (SEQ ID NO: 2972), UUGguagagg (SEQ ID NO: 2973), UUGguaggac (SEQ ID NO: 2974), UUGguaggcg (SEQ ID NO: 2975), UUGguaggcu (SEQ ID NO: 2976), UUGguaggga (SEQ ID NO: 2977), UUGguaggua (SEQ ID NO: 2978), UUGguagguc (SEQ ID NO: 2979), UUGguaggug (SEQ ID NO: 2980), UUGguauaaa (SEQ ID NO: 2981), UUGguauaca (SEQ ID NO: 2982), UUGguauauu (SEQ ID NO: 2983), UUGguaucua (SEQ ID NO: 2984), UUGguaucuc (SEQ ID NO: 2985), UUGguaugca (SEQ ID NO: 2986), UUGguaugua (SEQ ID NO: 2987), UUGguaugug (SEQ ID NO: 2988), UUGguauguu (SEQ ID NO: 2989), UUGguauugu (SEQ ID NO: 2990), UUGguauuua (SEQ ID NO: 2991), UUGguauuuu (SEQ ID NO: 2992), UUGgucagaa (SEQ ID NO: 2993), UUGgucagua (SEQ ID NO: 2994), UUGgucucug (SEQ ID NO: 2995), UUGgucugca (SEQ ID NO: 2996), UUGgugaaaa (SEQ ID NO: 2997), UUGgugacug (SEQ ID NO: 2998), UUGgugagac (SEQ ID NO: 2999), UUGgugagau (SEQ ID NO: 3000), UUGgugagca (SEQ ID NO: 3001), UUGgugagga (SEQ ID NO: 3002), UUGgugaggg (SEQ ID NO: 3003), UUGgugagua (SEQ ID NO: 3004), UUGgugaguc (SEQ ID NO: 3005), UUGgugagug (SEQ ID NO: 3006), UUGgugaguu (SEQ ID NO: 3007), UUGgugaugg (SEQ ID NO: 3008), UUGgugauua (SEQ ID NO: 3009), UUGgugauug (SEQ ID NO: 3010), UUGgugcaca (SEQ ID NO: 3011), UUGgugggaa (SEQ ID NO: 3012), UUGguggggc (SEQ ID NO: 3013), UUGgugggua (SEQ ID NO: 3014), UUGguggguc (SEQ ID NO: 3015), UUGgugggug (SEQ ID NO: 3016), UUGguggguu (SEQ ID NO: 3017), UUGguguggu (SEQ ID NO: 3018), UUGguguguc (SEQ ID NO: 3019), UUGgugugug (SEQ ID NO: 3020), UUGguguguu (SEQ ID NO: 3021), UUGguuaagu (SEQ ID NO: 3022), UUGguuagca (SEQ ID NO: 3023), UUGguuagug (SEQ ID NO: 3024), UUGguuaguu (SEQ ID NO: 3025), UUGguuggga (SEQ ID NO: 3026), UUGguugguu (SEQ ID NO: 3027), UUGguuugua (SEQ ID NO: 3028), UUGguuuguc (SEQ ID NO: 3029), UUUgcaagug (SEQ ID NO: 3030), UUUguaaaua (SEQ ID NO: 3031), UUUguaaaug (SEQ ID NO: 3032), UUUguaagaa (SEQ ID NO: 3033), UUUguaagac (SEQ ID NO: 3034), UUUguaagag (SEQ ID NO: 3035), UUUguaagca (SEQ ID NO: 3036), UUUguaaggu (SEQ ID NO: 3037), UUUguaagua (SEQ ID NO: 3038), UUUguaaguc (SEQ ID NO: 3039), UUUguaagug (SEQ ID NO: 3040), UUUguaaguu (SEQ ID NO: 3041), UUUguaauuu (SEQ ID NO: 3042), UUUguacagg (SEQ ID NO: 3043), UUUguacgug (SEQ ID NO: 3044), UUUguacuag (SEQ ID NO: 3045), UUUguacugu (SEQ ID NO: 3046), UUUguagguu (SEQ ID NO: 3047), UUUguauccu (SEQ ID NO: 3048), UUUguauguu (SEQ ID NO: 3049), UUUgugagca (SEQ ID NO: 3050), UUUgugagug (SEQ ID NO: 3051), UUUgugcguc (SEQ ID NO: 3052), UUUguguguc (SEQ ID NO: 3053), and uGGguaccug (SEQ ID NO: 3054).

[0160] Additional exemplary gene sequences and splice site sequences (e.g., 5′ splice site sequences) include AAGgcaagau (SEQ ID NO: 96), AUGguaugug (SEQ ID NO: 937), GGGgugaggc (SEQ ID NO: 2281), CAGguaggug (SEQ ID NO: 1222), AAGgucagua (SEQ ID NO: 293), AAGguuagag (SEQ ID NO: 3055), AUGgcacuua (SEQ ID NO: 3056), UAAguaaguc (SEQ ID NO: 2423), UGGgugagcu (SEQ ID NO: 3057), CGAgcugggc (SEQ ID NO: 3058), AAAgcacccc (SEQ ID NO: 3059), UAGguggggg (SEQ ID NO: 3060), AGAguaacgu (SEQ ID NO: 3061), UCGgugaugu (SEQ ID NO: 3062), AAUgucaguu (SEQ ID NO: 516), AGGgucugag (SEQ ID NO: 3063), GAGgugacug (SEQ ID NO: 3064), AUGguagguu (SEQ ID NO: 3065), GAGgucuguc (SEQ ID NO: 2000), CAGguaugug (SEQ ID NO: 1260), CAAguacugc (SEQ ID NO: 3066), CACgugcgua (SEQ ID NO: 3067), CCGgugagcu (SEQ ID NO: 3068), CAGguacuuc (SEQ ID NO: 3069), CAGgcgagag (SEQ ID NO: 1115), GAAgcaagua (SEQ ID NO: 3070), AGGgugagca (SEQ ID NO: 789), CAGgcaaguc (SEQ ID NO: 3071), AAGgugaggc (SEQ ID NO: 344), CAGguaagua (SEQ ID NO: 1147), CCAguugggu (SEQ ID NO: 3072), AAGguguggg (SEQ ID NO: 3073), CAGguuggag (SEQ ID NO: 1484), CCGguaugaa (SEQ ID NO: 3074), UGGguaaugu (SEQ ID NO: 2845), CAGgugaggu (SEQ ID NO: 1344), AGAguaauag (SEQ ID NO: 3075), CAGguaugag (SEQ ID NO: 1249), AUGguaaguu (SEQ ID NO: 901), UUGguggguc (SEQ ID NO: 3015), UUUguaagca (SEQ ID NO: 3036), CUCguaugcc (SEQ ID NO: 3076), UAGguaagag (SEQ ID NO: 2483), UAGgcaaguu (SEQ ID NO: 3077), GGAguuaagu (SEQ ID NO: 3078), GAGguaugcc (SEQ ID NO: 1959), AAGguguggu (SEQ ID NO: 402), CAGgugggug (SEQ ID NO: 1415), UUAguaagua (SEQ ID NO: 2933), AAGguuggcu (SEQ ID NO: 3079), UGAguaugug (SEQ ID NO: 3080), CCAgccuucc (SEQ ID NO: 3081), CCUguacgug (SEQ ID NO: 3082), CCUguaggua (SEQ ID NO: 1601), CAGguacgcu (SEQ ID NO: 3083), GAGguucuuc (SEQ ID NO: 3084), AAGguugccu (SEQ ID NO: 3085), CGUguucacu (SEQ ID NO: 3086), CGGgugggga (SEQ ID NO: 3087), UAGgugggau (SEQ ID NO: 2614), CGGguaagga (SEQ ID NO: 3088), AAGguacuau (SEQ ID NO: 195), GGGguaagcu (SEQ ID NO: 2248), ACGguagagc (SEQ ID NO: 3089), CAGgugaaga (SEQ ID NO: 1318), GCGguaagag (SEQ ID NO: 3090), CAGguguugu (SEQ ID NO: 3091), GAAguuugug (SEQ ID NO: 3092), AUGgugagca (SEQ ID NO: 955), CGGguucgug (SEQ ID NO: 3093), AUUguccggc (SEQ ID NO: 3094), GAUgugugug (SEQ ID NO: 3095), AUGgucuguu (SEQ ID NO: 3096), AAGguaggau (SEQ ID NO: 219), CCGguaagau (SEQ ID NO: 1575), AAGguaaaga (SEQ ID NO: 126), GGGgugaguu (SEQ ID NO: 2285), AGGguuggug (SEQ ID NO: 808), GGAgugagug (SEQ ID NO: 2228), AGUguaagga (SEQ ID NO: 3097), UAGguaacug (SEQ ID NO: 2480), AAGgugaaga (SEQ ID NO: 3098), UGGguaagug (SEQ ID NO: 2843), CAGguaagag (SEQ ID NO: 1140), UAGgugagcg (SEQ ID NO: 3099), GAGguaaaaa (SEQ ID NO: 1865), GCCguaaguu (SEQ ID NO: 3100), AAGguuuugu (SEQ ID NO: 473), CAGgugagga (SEQ ID NO: 1341), ACAgcccaug (SEQ ID NO: 3101), GCGgugagcc (SEQ ID NO: 3102), CAGguaugca (SEQ ID NO: 1251), AUGguaccua (SEQ ID NO: 3103), CAAguaugua (SEQ ID NO: 1050), AUGgugguge (SEQ ID NO: 3104), UAAguggcag (SEQ ID NO: 3105), UAGguauagu (SEQ ID NO: 3106), CUGguauuua (SEQ ID NO: 3107), AGGguaaacg (SEQ ID NO: 3108), AUAguaagug (SEQ ID NO: 850), UUGguacuga (SEQ ID NO: 3109), GGUguaagcc (SEQ ID NO: 2303), GAGguggaua (SEQ ID NO: 3110), GAUguaagaa (SEQ ID NO: 3111), ACGgucaguu (SEQ ID NO: 3112), UAAguaaaca (SEQ ID NO: 3113), AAGguaucug (SEQ ID NO: 251), AGGguauuug (SEQ ID NO: 3114), AAGgugaaug (SEQ ID NO: 328), CUGgugaauu (SEQ ID NO: 1749), CAGguuuuuu (SEQ ID NO: 1514), CAUguaugug (SEQ ID NO: 1534), UUGguagagg (SEQ ID NO: 2973), AAGguaugcc (SEQ ID NO: 258), CAGgugccac (SEQ ID NO: 3115), UCGguauuga (SEQ ID NO: 2727), AAGguuugug (SEQ ID NO: 468), AAUguacagg (SEQ ID NO: 3116), CAUguggguu (SEQ ID NO: 1545), CAUgugaguu (SEQ ID NO: 1542), UUGguaaugu (SEQ ID NO: 2968), AGUguaggug (SEQ ID NO: 3117), GAGguaacuc (SEQ ID NO: 3118), GAGguggcgc (SEQ ID NO: 3119), CUGguaauug (SEQ ID NO: 3120), GAGguuugcu (SEQ ID NO: 3121), UGUguacgug (SEQ ID NO: 3122), UAGguaaaga (SEQ ID NO: 2468), CUAguaggca (SEQ ID NO: 3123), UCUgugaguc (SEQ ID NO: 2761), UCUguaaggc (SEQ ID NO: 3124), CAGguuugug (SEQ ID NO: 1509), GAGguagggc (SEQ ID NO: 1935), AAGguaacca (SEQ ID NO: 3125), ACUgugaguu (SEQ ID NO: 646), UAGguaauag (SEQ ID NO: 2495), AAAguaagcu (SEQ ID NO: 17), AUGgugagug (SEQ ID NO: 963), UAGguuugug (SEQ ID NO: 2645), AACguaggac (SEQ ID NO: 3126), GUAgcaggua (SEQ ID NO: 3127), GAGgucagac (SEQ ID NO: 3128), AGGguaugaa (SEQ ID NO: 3129), GAGguuagug (SEQ ID NO: 2089), CAGgcacgug (SEQ ID NO: 3130), GGGgcaagac (SEQ ID NO: 3131), CAGguguguc (SEQ ID NO: 1441), CAGguauuga (SEQ ID NO: 1265), CAGguauguc (SEQ ID NO: 1259), AAGgcaaggu (SEQ ID NO: 3132), UUGgugagaa (SEQ ID NO: 3133), AAGguaaaau (SEQ ID NO: 122), GGGguaagua (SEQ ID NO: 2251), AAGguaucuu (SEQ ID NO: 252), GACgugaguc (SEQ ID NO: 3134), UAUguaugcu (SEQ ID NO: 3135), AAGguacugu (SEQ ID NO: 199), CAGgugaacu (SEQ ID NO: 3136), CACguaaaug (SEQ ID NO: 3137), AAGgugugau (SEQ ID NO: 3138), GAAguauuug (SEQ ID NO: 3139), AAGgucugug (SEQ ID NO: 3140), AAGguggagg (SEQ ID NO: 3141), AAGguauaug (SEQ ID NO: 244), CAGguucuua (SEQ ID NO: 1477), AGGguaacca (SEQ ID NO: 730), CAGgugucac (SEQ ID NO: 1423), AAAguucugu (SEQ ID NO: 3142), UUGgugaguu (SEQ ID NO: 3007), CAAgugaguc (SEQ ID NO: 1067), UAGguagguc (SEQ ID NO: 2525), GCGgugagcu (SEQ ID NO: 2180), AUUgugagga (SEQ ID NO: 3143), CAGgugcaca (SEQ ID NO: 1361), CAGguuggaa (SEQ ID NO: 3144), CUGgucacuu (SEQ ID NO: 3145), GGAguaagug (SEQ ID NO: 2214), GAGgugggcu (SEQ ID NO: 2059), AAGguacuug (SEQ ID NO: 201), AGGguaggau (SEQ ID NO: 3146), AAUguguguu (SEQ ID NO: 3147), ACAguuaagu (SEQ ID NO: 568), GAGgugugug (SEQ ID NO: 2078), AAGgcgggcu (SEQ ID NO: 3148), AUAgcaagua (SEQ ID NO: 3149), AAGguuguua (SEQ ID NO: 454), CAAgcaaggc (SEQ ID NO: 3150), GUGguaauua (SEQ ID NO: 3151), UCUguucagu (SEQ ID NO: 3152), AGGguaggcc (SEQ ID NO: 754), AAGguaucau (SEQ ID NO: 3153), UAGguaccuu (SEQ ID NO: 2509), AAGguaugac (SEQ ID NO: 254), GGAguaggua (SEQ ID NO: 2219), UAAguuggca (SEQ ID NO: 3154), AGUgugagge (SEQ ID NO: 3155), GAGguuugug (SEQ ID NO: 3156), UGGgucugcu (SEQ ID NO: 3157), CAGgugaucc (SEQ ID NO: 1350), CAGgucagug (SEQ ID NO: 1283), AAGguaaggg (SEQ ID NO: 151), CAGgugcagu (SEQ ID NO: 3158), GAGguggguc (SEQ ID NO: 2064), GCUgugagug (SEQ ID NO: 2206), AAGguggagu (SEQ ID NO: 3159), GGGgucaguu (SEQ ID NO: 3160), AGCguaagug (SEQ ID NO: 719), AGAguaugaa (SEQ ID NO: 691), GGGguagggu (SEQ ID NO: 3161), AAGgccagca (SEQ ID NO: 3162), CGAguaugcc (SEQ ID NO: 3163), GUGgugageg (SEQ ID NO: 3164), AAUguaaauu (SEQ ID NO: 481), CAGgugcgca (SEQ ID NO: 1375), GGUguaugaa (SEQ ID NO: 3165), CUUgugaguu (SEQ ID NO: 1804), AAGguaucuc (SEQ ID NO: 250), AGAguaagga (SEQ ID NO: 665), UAGguaagac (SEQ ID NO: 2482), GAGgugagug (SEQ ID NO: 2026), CAGguguguu (SEQ ID NO: 1443), UUGgugagua (SEQ ID NO: 3004), AGGgcgaguu (SEQ ID NO: 3166), CAGguuuugc (SEQ ID NO: 3167), UUUgugaguu (SEQ ID NO: 3168), AGGguaagca (SEQ ID NO: 736), GAGguccucu (SEQ ID NO: 3169), CCAgcaggua (SEQ ID NO: 3170), GAGguucgcg (SEQ ID NO: 3171), CAGgugaucu (SEQ ID NO: 1351), ACUguaagua (SEQ ID NO: 625), AAGguaaauc (SEQ ID NO: 131), CAGgcaaaua (SEQ ID NO: 3172), GUGguaagca (SEQ ID NO: 2346), CAGguuaaau (SEQ ID NO: 3173), UUGguaauaa (SEQ ID NO: 3174), UAUguaggua (SEQ ID NO: 3175), CAGguaguau (SEQ ID NO: 1225), AAGgugugcc (SEQ ID NO: 3176), UGGguaagag (SEQ ID NO: 2834), CAGgcaagca (SEQ ID NO: 3177), UUGguaaggg (SEQ ID NO: 2961), AAGgcaggug (SEQ ID NO: 109), ACGguaaaug (SEQ ID NO: 3178), GCUgugagca (SEQ ID NO: 3179), AUGguacaca (SEQ ID NO: 3180), GUAguguguu (SEQ ID NO: 3181), ACUguaagag (SEQ ID NO: 3182), CCCgcagguc (SEQ ID NO: 3183), GAGgugagcc (SEQ ID NO: 2019), GAGgugcugu (SEQ ID NO: 3184), UAAguaugcu (SEQ ID NO: 3185), GAGgccaucu (SEQ ID NO: 3186), UCAgugagug (SEQ ID NO: 2700), CAGgugcuac (SEQ ID NO: 3187), AAUgugggug (SEQ ID NO: 533), GAGgugugaa (SEQ ID NO: 3188), CUGguagguc (SEQ ID NO: 1730), GUGgegegeg (SEQ ID NO: 3189), CAGgugcaaa (SEQ ID NO: 1359), UAAguggagg (SEQ ID NO: 3190), CAUgugggua (SEQ ID NO: 3191), GAGguagggu (SEQ ID NO: 3192), AAAgugaguu (SEQ ID NO: 61), AGGguucuag (SEQ ID NO: 3193), UGUgugagcu (SEQ ID NO: 3194), AGGgugaauc (SEQ ID NO: 3195), CAGgucaggg (SEQ ID NO: 3196), AAGgucccug (SEQ ID NO: 3197), CUGguagagu (SEQ ID NO: 3198), UAGgucaguu (SEQ ID NO: 2570), AAAguaaggg (SEQ ID NO: 19), CAAguaugug (SEQ ID NO: 1052), CAGgugcuuu (SEQ ID NO: 3199), AAGguaauuc (SEQ ID NO: 169), GGGgugcacg (SEQ ID NO: 3200), ACUgugcuac (SEQ ID NO: 3201), CAGguaccua (SEQ ID NO: 3202), CAGguagcuu (SEQ ID NO: 1211), UGGgugaggc (SEQ ID NO: 2873), CUGguacauu (SEQ ID NO: 1718), AGGguaaucu (SEQ ID NO: 3203), CAGguacaag (SEQ ID NO: 1161), CAGguaauuc (SEQ ID NO: 1157), AGGgcacuug (SEQ ID NO: 3204), UAGgugagaa (SEQ ID NO: 2587), GAGguaaugc (SEQ ID NO: 3205), CCAgugaguu (SEQ ID NO: 3206), AAAguaugug (SEQ ID NO: 44), CUGgugaauc (SEQ ID NO: 3207), UAUguaugua (SEQ ID NO: 2663), CCUgcaggug (SEQ ID NO: 3208), CAGguaucug (SEQ ID NO: 1245), GAGgugaggu (SEQ ID NO: 3209), CUGguaaaac (SEQ ID NO: 3210), UGUgugugcu (SEQ ID NO: 3211), CAGguuaagu (SEQ ID NO: 3212), CAGguaaucc (SEQ ID NO: 1152), UAGguauuug (SEQ ID NO: 3213), UGGguagguc (SEQ ID NO: 2852), CAGguaacag (SEQ ID NO: 1129), AGCgugcgug (SEQ ID NO: 3214), AAGgucagga (SEQ ID NO: 289), GGUgugagcc (SEQ ID NO: 2312), CUGguaagua (SEQ ID NO: 1707), GGGgugggca (SEQ ID NO: 3215), AAGgugggaa (SEQ ID NO: 376), CAGgugagug (SEQ ID NO: 1347), CUGguuguua (SEQ ID NO: 3216), CAGguaauag (SEQ ID NO: 3217), UAGgugaguu (SEQ ID NO: 3218), AGAguaaguu (SEQ ID NO: 671), UAGguaaucc (SEQ ID NO: 3219), CCGgugacug (SEQ ID NO: 3220), GUCgugauua (SEQ ID NO: 3221), CUUguaagug (SEQ ID NO: 1794), UAGguaguca (SEQ ID NO: 3222), CUGguaaguc (SEQ ID NO: 3223), AGGgugagcg (SEQ ID NO: 3224), CAGguaugga (SEQ ID NO: 1255), AUUgugacca (SEQ ID NO: 3225), GUUgugggua (SEQ ID NO: 2411), AAGguacaag (SEQ ID NO: 173), CUAgcaagug (SEQ ID NO: 3226), CUGgugagau (SEQ ID NO: 3227), CAGgugggca (SEQ ID NO: 1406), AUGgcucgag (SEQ ID NO: 3228), CUGguacguu (SEQ ID NO: 1720), UUGgugugua (SEQ ID NO: 3229), GAGgugucug (SEQ ID NO: 3230), GAGgugggac (SEQ ID NO: 3231), GGGgugggag (SEQ ID NO: 3232), GCAgcgugag (SEQ ID NO: 3233), GAGguaaaga (SEQ ID NO: 1870), GAGguaugua (SEQ ID NO: 1965), AAGgugagac (SEQ ID NO: 336), AAGguacaau (SEQ ID NO: 174), CUGguaugag (SEQ ID NO: 3234), AACguaaaau (SEQ ID NO: 3235), GUGguaggga (SEQ ID NO: 2364), CUGguaugug (SEQ ID NO: 1737), CUUguaagca (SEQ ID NO: 3236), AAGguaggga (SEQ ID NO: 223), AUUguaagcc (SEQ ID NO: 3237), AUGguaagcu (SEQ ID NO: 895), CAGgugaauu (SEQ ID NO: 1322), UAGgugaaua (SEQ ID NO: 2581), CAAguaugga (SEQ ID NO: 3238), AUGguauggc (SEQ ID NO: 936), GAGgucaugc (SEQ ID NO: 3239), CAGguacccu (SEQ ID NO: 1174), ACAgugagac (SEQ ID NO: 3240), CAGgucugau (SEQ ID NO: 3241), GAAguugggu (SEQ ID NO: 3242), CUGgugegug (SEQ ID NO: 1767), CAGguacgag (SEQ ID NO: 1180), ACAgugagcc (SEQ ID NO: 556), AAGguaagua (SEQ ID NO: 153), GGAguaaggc (SEQ ID NO: 3243), GAGgugugua (SEQ ID NO: 2077), AAGgucauuu (SEQ ID NO: 3244), CAGguagucu (SEQ ID NO: 3245), AUGguaucug (SEQ ID NO: 3246), AAGguaaacu (SEQ ID NO: 125), GAGguaggug (SEQ ID NO: 1938), CUGguaagca (SEQ ID NO: 1700), AGGguaagag (SEQ ID NO: 734), AAAguaaagc (SEQ ID NO: 3247), CAGguuugag (SEQ ID NO: 1502), GAGgcgggua (SEQ ID NO: 3248), CGAguacgau (SEQ ID NO: 3249), CAGguuguug (SEQ ID NO: 1495), AAAguauggg (SEQ ID NO: 3250), UAGgcugguc (SEQ ID NO: 3251), AAGguaagga (SEQ ID NO: 149), AAGguuuccu (SEQ ID NO: 458), UUGguaaaac (SEQ ID NO: 3252), GAGguaagua (SEQ ID NO: 1893), CAGguucaag (SEQ ID NO: 1465), UGGguuaugu (SEQ ID NO: 3253), GAGgugaguu (SEQ ID NO: 2027), ACGgugaaac (SEQ ID NO: 598), GAUguaacca (SEQ ID NO: 3254), AAGgugcggg (SEQ ID NO: 3255), CCGguacgug (SEQ ID NO: 3256), GAUgugagaa (SEQ ID NO: 3257), GUGgegguga (SEQ ID NO: 3258), CAGguauuag (SEQ ID NO: 3259), GAGguuggga (SEQ ID NO: 3260), AAGgcuagua (SEQ ID NO: 3261), AAGgugggcg (SEQ ID NO: 381), CAGgcaggga (SEQ ID NO: 3262), AAUguuaguu (SEQ ID NO: 3263), GAGguaaagg (SEQ ID NO: 3264), CAGgugugcu (SEQ ID NO: 1437), CUGguaugau (SEQ ID NO: 1733), AUGguuaguc (SEQ ID NO: 978), CUGgugagaa (SEQ ID NO: 1751), CAGgccggcg (SEQ ID NO: 3265), CAGgugacug (SEQ ID NO: 1332), AAAguaaggu (SEQ ID NO: 20), UAAguacuug (SEQ ID NO: 3266), AAGguaaagc (SEQ ID NO: 127), UCGguagggg (SEQ ID NO: 3267), CAGguaggaa (SEQ ID NO: 1212), AGUguaagca (SEQ ID NO: 817), CCCgugagau (SEQ ID NO: 3268), GUGguuguuu (SEQ ID NO: 3269), CAGguuugcc (SEQ ID NO: 1504), AGGguauggg (SEQ ID NO: 766), UAAguaagug (SEQ ID NO: 2424), GAGguaagac (SEQ ID NO: 3270), GAUguagguc (SEQ ID NO: 3271), CAAguaggug (SEQ ID NO: 1043), AUAguaaaua (SEQ ID NO: 845), GAGguugggg (SEQ ID NO: 3272), GAGgcgagua (SEQ ID NO: 3273), CAGguagugu (SEQ ID NO: 1229), GUGguaggug (SEQ ID NO: 2366), CAAgugagug (SEQ ID NO: 1068), AAGgugacaa (SEQ ID NO: 330), CCAgcguaau (SEQ ID NO: 3274), ACGgugaggu (SEQ ID NO: 3275), GGGguauauu (SEQ ID NO: 3276), CAGgugagua (SEQ ID NO: 1345), AAGgugcgug (SEQ ID NO: 364), UAUguaaauu (SEQ ID NO: 3277), CAGgucagua (SEQ ID NO: 1281), ACGguacuua (SEQ ID NO: 3278), GAGgucagca (SEQ ID NO: 3279), UAAguaugua (SEQ ID NO: 2431), GGGgucagac (SEQ ID NO: 3280), AAUgugugag (SEQ ID NO: 3281), UCCgucagua (SEQ ID NO: 3282), CAGgugcuuc (SEQ ID NO: 1391), CCAguuagug (SEQ ID NO: 3283), CCGgugggcg (SEQ ID NO: 1590), AGGgugcaug (SEQ ID NO: 3284), GGGguaggau (SEQ ID NO: 3285), UAGgugggcc (SEQ ID NO: 2615), GAGguguucg (SEQ ID NO: 3286), UUGgcaagaa (SEQ ID NO: 3287), UCCguaagua (SEQ ID NO: 3288), CAGguguaag (SEQ ID NO: 3289), CUCgugagua (SEQ ID NO: 1680), GAGguguuuu (SEQ ID NO: 3290), GAGgugagca (SEQ ID NO: 2018), GAGguaaagu (SEQ ID NO: 1872), AAGguacguu (SEQ ID NO: 193), CAGguccagu (SEQ ID NO: 1291), AUGgugaaac (SEQ ID NO: 947), GUAgugagcu (SEQ ID NO: 3291), CAGgugaaaa (SEQ ID NO: 3292), AGGguacagg (SEQ ID NO: 3293), AAGguaacgc (SEQ ID NO: 3294), AAGguauacc (SEQ ID NO: 3295), CCUgugagau (SEQ ID NO: 3296), GGGguacgug (SEQ ID NO: 3297), GAGguauggu (SEQ ID NO: 1964), UAGguauuau (SEQ ID NO: 2557), GAAguaggag (SEQ ID NO: 3298), UCGguaaggg (SEQ ID NO: 3299), CCGguaagcg (SEQ ID NO: 3300), GAAguaauua (SEQ ID NO: 1823), CAGgugaguc (SEQ ID NO: 1346), AAGgucaaga (SEQ ID NO: 279), AUGguaaguc (SEQ ID NO: 899), CAGgugagcu (SEQ ID NO: 1340), CCAguuuuug (SEQ ID NO: 3301), CAGgugggag (SEQ ID NO: 1404), AAGguauuau (SEQ ID NO: 270), AAGguaaaua (SEQ ID NO: 130), AAGgugcugu (SEQ ID NO: 3302), AAAguacacc (SEQ ID NO: 3303), CUGguucgug (SEQ ID NO: 1783), UCAguaaguc (SEQ ID NO: 2690), GAAguacgug (SEQ ID NO: 3304), CAGgugacaa (SEQ ID NO: 1323), UGGguaagaa (SEQ ID NO: 2832), UGUguagggg (SEQ ID NO: 3305), GAGguaggca (SEQ ID NO: 1932), UUGgugaggc (SEQ ID NO: 3306), AUGgugugua (SEQ ID NO: 974), CAGguccucc (SEQ ID NO: 3307), UUGguaaaug (SEQ ID NO: 2953), GCUgugaguu (SEQ ID NO: 2207), AUGgucugua (SEQ ID NO: 3308), CAUgcaggug (SEQ ID NO: 3309), CUGguacacc (SEQ ID NO: 3310), CAGguccuua (SEQ ID NO: 3311), CAAguaaucu (SEQ ID NO: 1031), AUGgcagccu (SEQ ID NO: 3312), AAGgucagaa (SEQ ID NO: 282), AACgugaggc (SEQ ID NO: 3313), CAGgcacgca (SEQ ID NO: 1106), ACGguccagg (SEQ ID NO: 3314), UCUguacaua (SEQ ID NO: 3315), GAGgugauua (SEQ ID NO: 3316), ACGguaaaua (SEQ ID NO: 3317), AUGguaacug (SEQ ID NO: 3318), CAGgcgcguu (SEQ ID NO: 3319), CAGguauaga (SEQ ID NO: 1235), AAGguuuguu (SEQ ID NO: 3320), CAGguaugaa (SEQ ID NO: 1247), UAGguuggua (SEQ ID NO: 2638), CUGgugagac (SEQ ID NO: 1752), CAGguuagga (SEQ ID NO: 3321), AUGgugacug (SEQ ID NO: 3322), UUGguauccc (SEQ ID NO: 3323), CUUguaggac (SEQ ID NO: 3324), AAAguguguu (SEQ ID NO: 69), CAGguuucuu (SEQ ID NO: 1500), GGGguauggc (SEQ ID NO: 3325), GGGguaggac (SEQ ID NO: 3326), ACUguaaguc (SEQ ID NO: 626), AUCguaagcu (SEQ ID NO: 3327), UAGguucccc (SEQ ID NO: 2636), GGUgugagca (SEQ ID NO: 3328), CUGguuggua (SEQ ID NO: 3329), GGGguuaggg (SEQ ID NO: 3330), UGAguaagaa (SEQ ID NO: 3331), GAGguauucc (SEQ ID NO: 1969), UGGguuaguc (SEQ ID NO: 2893), CAGgcucgug (SEQ ID NO: 3332), UAGguagagu (SEQ ID NO: 3333), UAGgugcccu (SEQ ID NO: 3334), AAAgugagua (SEQ ID NO: 58), GAGguucaua (SEQ ID NO: 2094), UUGguaagag (SEQ ID NO: 2958), ACCgugugua (SEQ ID NO: 3335), UAUguaguau (SEQ ID NO: 3336), UGGguaauag (SEQ ID NO: 3337), CAGgucugaa (SEQ ID NO: 3338), AAAguauaaa (SEQ ID NO: 3339), GUGgugaguc (SEQ ID NO: 3340), AGUgugauua (SEQ ID NO: 3341), UUGgugugug (SEQ ID NO: 3020), CAGgugaugg (SEQ ID NO: 1353), GCUgugagua (SEQ ID NO: 2204), CAGguacaug (SEQ ID NO: 1169), AAGguacagu (SEQ ID NO: 178), GAAguuguag (SEQ ID NO: 3342), CAGgugauua (SEQ ID NO: 1355), UAGgugaauu (SEQ ID NO: 2583), GGUguuaaua (SEQ ID NO: 3343), CAGguauuua (SEQ ID NO: 1268), CAAguacucg (SEQ ID NO: 3344), CAAguaagaa (SEQ ID NO: 1022), AAGguaccuu (SEQ ID NO: 188), ACGgugaggg (SEQ ID NO: 3345), UGAgcaggca (SEQ ID NO: 3346), GGGgugaccg (SEQ ID NO: 3347), GAGguaaaug (SEQ ID NO: 1875), CGGguuugug (SEQ ID NO: 3348), AAGgugagcg (SEQ ID NO: 341), GUGguaugga (SEQ ID NO: 3349), CUGguaagga (SEQ ID NO: 1703), GAGguaccag (SEQ ID NO: 1911), CCGgugagug (SEQ ID NO: 1587), AAGguuagaa (SEQ ID NO: 416), GAGguacuug (SEQ ID NO: 1921), AGAguaaaac (SEQ ID NO: 651), UCUgugagua (SEQ ID NO: 2760), AAGgcgggaa (SEQ ID NO: 3350), CAGguaugcg (SEQ ID NO: 1253), AGGguaaaac (SEQ ID NO: 3351), AAGgugacug (SEQ ID NO: 333), AGGguauguu (SEQ ID NO: 3352), AAGguaugua (SEQ ID NO: 263), CAGgucucuc (SEQ ID NO: 1302), CAGgcaugua (SEQ ID NO: 3353), CUGguaggua (SEQ ID NO: 1729), AAGgucaugc (SEQ ID NO: 3354), CAGguacaca (SEQ ID NO: 1163), GAUguacguu (SEQ ID NO: 3355), ACAguacgug (SEQ ID NO: 3356), ACGguaccca (SEQ ID NO: 3357), CAGguagugc (SEQ ID NO: 3358), ACAguaagag (SEQ ID NO: 3359), GGUgcacacc (SEQ ID NO: 3360), GAGguguaac (SEQ ID NO: 3361), AAGgugugua (SEQ ID NO: 403), UAGguacuua (SEQ ID NO: 3362), GCGguacugc (SEQ ID NO: 3363), UGGguaaguc (SEQ ID NO: 2842), CAUguaggua (SEQ ID NO: 1529), CAGguaggau (SEQ ID NO: 3364), CAGgucuggc (SEQ ID NO: 3365), GUGguuuuaa (SEQ ID NO: 3366), CAGgugggaa (SEQ ID NO: 1402), UGGgugagua (SEQ ID NO: 2875), CGAgugagcc (SEQ ID NO: 3367), AAGguauggc (SEQ ID NO: 261), AGUguuguca (SEQ ID NO: 3368), CAGgugauuu (SEQ ID NO: 1358), UAGguaucuc (SEQ ID NO: 2544), UAAguauguu (SEQ ID NO: 3369), AAGguugagc (SEQ ID NO: 3370), AGAguaaaga (SEQ ID NO: 653), GGUguaagua (SEQ ID NO: 3371), GGGgugagcu (SEQ ID NO: 2279), CAGguauaau (SEQ ID NO: 3372), GAGguacaaa (SEQ ID NO: 1904), AUGguaccaa (SEQ ID NO: 3373), UAGguagggg (SEQ ID NO: 2523), UGAgucagaa (SEQ ID NO: 3374), AAGgcaauua (SEQ ID NO: 3375), UUGguaagau (SEQ ID NO: 3376), CAGguacaga (SEQ ID NO: 1165), AGAguuagag (SEQ ID NO: 3377), CAGgugcguc (SEQ ID NO: 1381), GAGguauuac (SEQ ID NO: 3378), ACGguacaga (SEQ ID NO: 3379), CAGgucuucc (SEQ ID NO: 1313), AAGguaaggu (SEQ ID NO: 152), GAGguaauuu (SEQ ID NO: 1903), AGUguaggcu (SEQ ID NO: 3380), AAAguaagcg (SEQ ID NO: 3381), CCUguaagcc (SEQ ID NO: 3382), AGGgugauuu (SEQ ID NO: 3383), UGUguaugaa (SEQ ID NO: 3384), CUGguacaca (SEQ ID NO: 3385), AGGguagaga (SEQ ID NO: 3386), AUAguaagca (SEQ ID NO: 848), AGAguaugua (SEQ ID NO: 3387), UUGgucagca (SEQ ID NO: 3388), CAGgcaaguu (SEQ ID NO: 1105), AAGguauaua (SEQ ID NO: 242), AAGgucugga (SEQ ID NO: 314), CAGguacgca (SEQ ID NO: 1181), AGGgugcggg (SEQ ID NO: 3389), AUGguaagug (SEQ ID NO: 900), AAAgugauga (SEQ ID NO: 3390), UGCgugagua (SEQ ID NO: 3391), AGAguaggga (SEQ ID NO: 684), UGUguaggua (SEQ ID NO: 2912), UAGguaggau (SEQ ID NO: 2521), UAAgugagug (SEQ ID NO: 2440), GCUguaagua (SEQ ID NO: 2193), GAAguaagaa (SEQ ID NO: 1814), UCGgugaggc (SEQ ID NO: 2733), UAGguauuuu (SEQ ID NO: 2564), AAGguacaca (SEQ ID NO: 3392), AAGguaggua (SEQ ID NO: 227), UGGguagguu (SEQ ID NO: 2854), ACAgcaagua (SEQ ID NO: 541), GAGguaggag (SEQ ID NO: 1931), UGGgugaguu (SEQ ID NO: 2878), GCGgugagau (SEQ ID NO: 3393), CCUguagguu (SEQ ID NO: 3394), CAGgugugua (SEQ ID NO: 1440), CUGguaagcc (SEQ ID NO: 1701), AAGgugauuc (SEQ ID NO: 3395), CAGguagcua (SEQ ID NO: 1208), GUUguaagug (SEQ ID NO: 3396), AUGguaagca (SEQ ID NO: 893), AUAguaggga (SEQ ID NO: 3397), GGGguucgcu (SEQ ID NO: 3398), CCGgucagag (SEQ ID NO: 3399), GUAguaugag (SEQ ID NO: 3400), CGUguaagau (SEQ ID NO: 3401), UGAguaggca (SEQ ID NO: 3402), UCAguaugua (SEQ ID NO: 3403), GAGguaucug (SEQ ID NO: 1954), AGAguauuuu (SEQ ID NO: 3404), AAGguuguag (SEQ ID NO: 3405), AGUguaaguu (SEQ ID NO: 821), CGGguaaguu (SEQ ID NO: 1626), UCGgugcgga (SEQ ID NO: 3406), UAGguaagua (SEQ ID NO: 2491), GAAguuagau (SEQ ID NO: 3407), GCUgugagac (SEQ ID NO: 3408), CAGgcaggua (SEQ ID NO: 3409), CAGguagggg (SEQ ID NO: 1218), UAAguuaaga (SEQ ID NO: 3410), AUGguggguu (SEQ ID NO: 970), UAGguaaguu (SEQ ID NO: 2494), CUGguaaauu (SEQ ID NO: 1690), CCGguaagga (SEQ ID NO: 1577), GAGgcaggca (SEQ ID NO: 3411), CAUguaagug (SEQ ID NO: 1523), AAGgugccua (SEQ ID NO: 3412), UUGguaggga (SEQ ID NO: 2977), AAGguaaaca (SEQ ID NO: 123), CGGgugugag (SEQ ID NO: 3413), GGGgugugag (SEQ ID NO: 3414), UCCguggguc (SEQ ID NO: 3415), ACGguaaauc (SEQ ID NO: 3416), UCAguaggua (SEQ ID NO: 3417), CAGgucagcc (SEQ ID NO: 1278), CAGgcggugg (SEQ ID NO: 3418), CGAguaagcu (SEQ ID NO: 3419), CCCgugagca (SEQ ID NO: 3420), AAAguaauga (SEQ ID NO: 3421), CUGguaagcu (SEQ ID NO: 1702), CGGguaacca (SEQ ID NO: 3422), CAGgucgcac (SEQ ID NO: 3423), GAGguaggcc (SEQ ID NO: 3424), UAGgugagcc (SEQ ID NO: 2591), UAGguaggca (SEQ ID NO: 3425), GCGgugcgug (SEQ ID NO: 3426), AUGgugagua (SEQ ID NO: 961), GGGgugaggg (SEQ ID NO: 2282), GAGgucacac (SEQ ID NO: 3427), CAGguaggcc (SEQ ID NO: 3428), CAAgugcuga (SEQ ID NO: 3429), GUCgucuuca (SEQ ID NO: 3430), CAUguaagaa (SEQ ID NO: 1518), GUAguaagga (SEQ ID NO: 3431), UAGguuugua (SEQ ID NO: 2643), CAAguuagag (SEQ ID NO: 3432), AAGguagagu (SEQ ID NO: 208), AAGgugagau (SEQ ID NO: 338), AAAguaggua (SEQ ID NO: 37), ACAgugaauc (SEQ ID NO: 3433), CAGgugugcg (SEQ ID NO: 1436), CAGgucggcc (SEQ ID NO: 1299), AAGguaguau (SEQ ID NO: 3434), ACUgucaguc (SEQ ID NO: 3435), UCUgcagccu (SEQ ID NO: 3436), CGAguaagug (SEQ ID NO: 3437), AGAguaauua (SEQ ID NO: 3438), AGUgugagug (SEQ ID NO: 837), CCGgugagcg (SEQ ID NO: 3439), AAGguaaccu (SEQ ID NO: 3440), AAGguugugg (SEQ ID NO: 3441), AAGgcauggg (SEQ ID NO: 3442), AAGgucagag (SEQ ID NO: 284), ACGguaaggu (SEQ ID NO: 3443), GGGgugagca (SEQ ID NO: 3444), GAGguugcuu (SEQ ID NO: 3445), AAGguaucgc (SEQ ID NO: 3446), CCGguaaagg (SEQ ID NO: 3447), AAAguuaaug (SEQ ID NO: 3448), UAGguacgag (SEQ ID NO: 2510), ACCguaauua (SEQ ID NO: 3449), GGGguaagga (SEQ ID NO: 2249), CCGguaacgc (SEQ ID NO: 3450), CAGgucagaa (SEQ ID NO: 1275), AAGguacuga (SEQ ID NO: 197), GAGgugacca (SEQ ID NO: 2010), GGGgugagcc (SEQ ID NO: 2277), AAGguacagg (SEQ ID NO: 177), AUGguaauua (SEQ ID NO: 3451), CAGgugagag (SEQ ID NO: 1335), AAGgugacuc (SEQ ID NO: 3452), AUAguaagua (SEQ ID NO: 849), GAGguaaacc (SEQ ID NO: 1869), CAGgugggau (SEQ ID NO: 1405), CAGgugagaa (SEQ ID NO: 1333), AGGguaaaaa (SEQ ID NO: 3453), GAGgugugac (SEQ ID NO: 3454), CACguaagcu (SEQ ID NO: 3455), CAGguccccc (SEQ ID NO: 3456), CAGgucaggu (SEQ ID NO: 3457), CGGguaaguc (SEQ ID NO: 3458), ACGguauggg (SEQ ID NO: 3459), GAUguaaguu (SEQ ID NO: 2123), CAAguaauau (SEQ ID NO: 3460), CAGguugggg (SEQ ID NO: 3461), CCUgugcugg (SEQ ID NO: 3462), AAGguaugau (SEQ ID NO: 256), AGGguagagg (SEQ ID NO: 3463), AAGguggguu (SEQ ID NO: 386), CAGgugugaa (SEQ ID NO: 1430), UUGguaugug (SEQ ID NO: 2988), UUGguaucuc (SEQ ID NO: 2985), GGGgugagug (SEQ ID NO: 2284), CUGgugugug (SEQ ID NO: 1779), AGGguagggc (SEQ ID NO: 3464), GUGgugagua (SEQ ID NO: 3465), CAGguaugua (SEQ ID NO: 1258), AAGguacauu (SEQ ID NO: 181), UUAguaagug (SEQ ID NO: 2934), AAUguauauc (SEQ ID NO: 3466), CUUguaagua (SEQ ID NO: 1793), GAGguuagua (SEQ ID NO: 2087), CAGguaaggu (SEQ ID NO: 1146), CAGguaaugu (SEQ ID NO: 1155), AGGgugaggc (SEQ ID NO: 3467), CAGguauuuc (SEQ ID NO: 1269), CAGgucugga (SEQ ID NO: 1307), GGGgugugcu (SEQ ID NO: 3468), UAGgugagug (SEQ ID NO: 2598), AAUguaaccu (SEQ ID NO: 3469), UAAgugaguc (SEQ ID NO: 2439), CAGgugcacu (SEQ ID NO: 3470), ACGguaagua (SEQ ID NO: 579), GAGguauccu (SEQ ID NO: 3471), UCUguaaguc (SEQ ID NO: 2745), CAGguauuca (SEQ ID NO: 1263), UGUguaagug (SEQ ID NO: 3472), CCAgcaaggc (SEQ ID NO: 3473), GAGgugaagg (SEQ ID NO: 2006), AAUguggggu (SEQ ID NO: 3474), UCGgugcgug (SEQ ID NO: 3475), UUGguaaggc (SEQ ID NO: 3476), GAGguaagug (SEQ ID NO: 3477), AAAguaagau (SEQ ID NO: 14), UAGgucuuuu (SEQ ID NO: 3478), GAGgucugau (SEQ ID NO: 3479), CCAguuagag (SEQ ID NO: 3480), UGGgugaaaa (SEQ ID NO: 3481), AGAguaagau (SEQ ID NO: 662), CAGguaauug (SEQ ID NO: 1158), CAGgccgguc (SEQ ID NO: 3482), CCGguaagag (SEQ ID NO: 3483), GAGgugagcu (SEQ ID NO: 2021), CUGguaagac (SEQ ID NO: 3484), CAGgugagau (SEQ ID NO: 1336), CUGguuuguu (SEQ ID NO: 3485), UGGguaggua (SEQ ID NO: 3486), CAGguuagug (SEQ ID NO: 1457), CAGguguucg (SEQ ID NO: 3487), CGGguagguc (SEQ ID NO: 3488), GUGguacaua (SEQ ID NO: 3489), AAGguacuaa (SEQ ID NO: 194), GAUgugagua (SEQ ID NO: 3490), UGUguaagac (SEQ ID NO: 2904), GAGguagccg (SEQ ID NO: 3491), UAGgugaucu (SEQ ID NO: 3492), CAGguacgug (SEQ ID NO: 1185), CUUgucaguc (SEQ ID NO: 3493), GAGguaucac (SEQ ID NO: 3494), GAGguaauga (SEQ ID NO: 3495), AAGguaacac (SEQ ID NO: 3496), CAGguaaagc (SEQ ID NO: 1123), AAGgcaagua (SEQ ID NO: 3497), CGCgugagcc (SEQ ID NO: 3498), AGUgugcguu (SEQ ID NO: 3499), GAUguaagca (SEQ ID NO: 2118), AAGguaauag (SEQ ID NO: 159), GGAgcaguug (SEQ ID NO: 3500), AGCguaagau (SEQ ID NO: 3501), AAGgucaggc (SEQ ID NO: 290), GAGguauuca (SEQ ID NO: 3502), AAUguaaagu (SEQ ID NO: 3503), CAGguaacaa (SEQ ID NO: 3504), UCGguaggug (SEQ ID NO: 3505), AAAguaaguc (SEQ ID NO: 22), CGGgugcagu (SEQ ID NO: 3506), GGUgugugca (SEQ ID NO: 3507), UGAgugagaa (SEQ ID NO: 2794), CACguguaag (SEQ ID NO: 3508), GUGguuggua (SEQ ID NO: 3509), GCAgccuuga (SEQ ID NO: 3510), CGAgugugau (SEQ ID NO: 3511), CAGguauaua (SEQ ID NO: 3512), UAUguaugug (SEQ ID NO: 2665), CCCgugguca (SEQ ID NO: 3513), AUGguaagac (SEQ ID NO: 890), GAGgugugga (SEQ ID NO: 2074), AGUguauccu (SEQ ID NO: 3514), UGAguguguc (SEQ ID NO: 3515), UGGguaaucu (SEQ ID NO: 3516), AUGgcagguu (SEQ ID NO: 3517), GAGguaagau (SEQ ID NO: 1884), UCAgcagcgu (SEQ ID NO: 3518), AAGgugggau (SEQ ID NO: 378), CGGgugcgcu (SEQ ID NO: 3519), CAGgugucug (SEQ ID NO: 1429), AGCgugguaa (SEQ ID NO: 3520), AAUgugaaug (SEQ ID NO: 3521), UCGgugagac (SEQ ID NO: 3522), UAGguaaagc (SEQ ID NO: 3523), CUGguaaaag (SEQ ID NO: 3524), CCGgugcgga (SEQ ID NO: 3525), CAGguacuca (SEQ ID NO: 3526), CAGguagcaa (SEQ ID NO: 1203), GAAguugagu (SEQ ID NO: 3527), GAGguggagg (SEQ ID NO: 2052), AGGguaugag (SEQ ID NO: 762), UAGguaugcu (SEQ ID NO: 3528), UAGgugagac (SEQ ID NO: 2588), CAGguaauua (SEQ ID NO: 1156), CGUguaagcc (SEQ ID NO: 3529), CUUguaaguu (SEQ ID NO: 1795), AAGguaacuu (SEQ ID NO: 140), UCGgcaaggc (SEQ ID NO: 3530), GAGguucucg (SEQ ID NO: 3531), GAGgugggcg (SEQ ID NO: 2058), AAGgcaugug (SEQ ID NO: 3532), CUGguauguu (SEQ ID NO: 1738), UAAgucauuu (SEQ ID NO: 3533), CAUguaauua (SEQ ID NO: 1525), AAUguaaaga (SEQ ID NO: 3534), UAGgugcuca (SEQ ID NO: 3535), AAGguaaugg (SEQ ID NO: 166), GAGguacuga (SEQ ID NO: 3536), UGGguaagua (SEQ ID NO: 2841), UGGguaaaaa (SEQ ID NO: 3537), AAGgugagcu (SEQ ID NO: 342), UACgugaguu (SEQ ID NO: 3538), AGGgugagcc (SEQ ID NO: 790), CGGgugagga (SEQ ID NO: 3539), UGGgugagag (SEQ ID NO: 2869), GGUguaagcu (SEQ ID NO: 3540), CGGguggguu (SEQ ID NO: 1648), CCAgcuaagu (SEQ ID NO: 3541), AAGguuuguc (SEQ ID NO: 467), GAGguuagac (SEQ ID NO: 2084), GAGguaccuc (SEQ ID NO: 3542), UUUguaaguu (SEQ ID NO: 3041), GAGguuagga (SEQ ID NO: 3543), CAGguaggga (SEQ ID NO: 1216), AGGguaauac (SEQ ID NO: 744), UGCgugugua (SEQ ID NO: 3544), CCAguaacca (SEQ ID NO: 3545), AGGgucuguc (SEQ ID NO: 3546), UGGguaugua (SEQ ID NO: 2860), GUGguaagcu (SEQ ID NO: 2348), CAGguaaccu (SEQ ID NO: 3547), AAGgugaguu (SEQ ID NO: 350), UAGguucgug (SEQ ID NO: 3548), AAAguuagua (SEQ ID NO: 3549), UGGgcaaguc (SEQ ID NO: 2816), AAGgcacagu (SEQ ID NO: 3550), GUUguaaguc (SEQ ID NO: 2401), AAGguuugcc (SEQ ID NO: 462), CUUgcauggg (SEQ ID NO: 3551), GCGgugagua (SEQ ID NO: 3552), GGGguaagcg (SEQ ID NO: 3553), GCCguaagaa (SEQ ID NO: 3554), GAGgucggga (SEQ ID NO: 3555), UUGguauugu (SEQ ID NO: 2990), AGUgugagac (SEQ ID NO: 3556), CUGgugggga (SEQ ID NO: 1770), AGAguaaggu (SEQ ID NO: 668), CCGguggguc (SEQ ID NO: 3557), CAGguauucu (SEQ ID NO: 1264), UGGguaacgu (SEQ ID NO: 3558), UUGgugagag (SEQ ID NO: 3559), UAGguacccu (SEQ ID NO: 3560), GGGgugcguc (SEQ ID NO: 3561), AAGgcaggag (SEQ ID NO: 3562), ACGguacauu (SEQ ID NO: 3563), GAGguaguua (SEQ ID NO: 1946), CAGguauggg (SEQ ID NO: 1256), UUUguguguc (SEQ ID NO: 3053), CAGguacuua (SEQ ID NO: 1194), AUGguauacu (SEQ ID NO: 3564), AGUgugagcc (SEQ ID NO: 833), ACAguaacga (SEQ ID NO: 3565), CUGguaccca (SEQ ID NO: 3566), CAGguaaccc (SEQ ID NO: 3567), GGAguaagua (SEQ ID NO: 3568), GAGgugggug (SEQ ID NO: 2065), ACUguauguc (SEQ ID NO: 3569), ACGgugagua (SEQ ID NO: 606), CUGguaaugu (SEQ ID NO: 3570), AAGguaucag (SEQ ID NO: 247), CAGgugcccc (SEQ ID NO: 1370), AGUgucagug (SEQ ID NO: 3571), AAGguaggag (SEQ ID NO: 218), GGAguaugug (SEQ ID NO: 3572), UUGguauuuu (SEQ ID NO: 2992), CCUguuguga (SEQ ID NO: 3573), UUUguaagaa (SEQ ID NO: 3033), UAGguaacau (SEQ ID NO: 2475), CAGguaagca (SEQ ID NO: 3574), CAGgucacag (SEQ ID NO: 3575), CAGgugugag (SEQ ID NO: 1432), UAGguuugcg (SEQ ID NO: 3576), CUGguaagaa (SEQ ID NO: 1697), ACGguuguau (SEQ ID NO: 3577), AAGguugggg (SEQ ID NO: 446), AAGgugaauu (SEQ ID NO: 329), GGGguuaguu (SEQ ID NO: 3578), ACGguaaggc (SEQ ID NO: 3579), CAGguuuaag (SEQ ID NO: 1496), CUGguaaguu (SEQ ID NO: 1709), GGGgugagag (SEQ ID NO: 3580), UGGguggguu (SEQ ID NO: 2886), GAGguuuguu (SEQ ID NO: 2111), UGGguaaaug (SEQ ID NO: 2826), CAGgcaggcc (SEQ ID NO: 3581), CACgugcagg (SEQ ID NO: 3582), AAGgugagcc (SEQ ID NO: 340), CAAguaagug (SEQ ID NO: 1028), CAGgucaguc (SEQ ID NO: 1282), GCGguauaau (SEQ ID NO: 3583), UAGguaaagu (SEQ ID NO: 3584), UAGguggauu (SEQ ID NO: 3585), GAGgucugga (SEQ ID NO: 3586), UCGgucaguu (SEQ ID NO: 3587), UGGguaacug (SEQ ID NO: 3588), AAGguuugau (SEQ ID NO: 3589), UGUgcuggug (SEQ ID NO: 3590), UGUguaccuc (SEQ ID NO: 3591), UGGguacagu (SEQ ID NO: 2849), AUCgucagcg (SEQ ID NO: 3592), CAGgucuugg (SEQ ID NO: 3593), GAAguuggua (SEQ ID NO: 3594), GAAguaaaga (SEQ ID NO: 3595), UUGguaagcu (SEQ ID NO: 2959), UAGguaccag (SEQ ID NO: 2507), AGGguaucau (SEQ ID NO: 3596), CAGguaaaaa (SEQ ID NO: 1118), ACGguaauuu (SEQ ID NO: 583), AUUguaaguu (SEQ ID NO: 997), GAGguacagu (SEQ ID NO: 1908), CAGgugaaag (SEQ ID NO: 1315), UGGguuguuu (SEQ ID NO: 3597), GGGguaggug (SEQ ID NO: 2259), CAGgugccca (SEQ ID NO: 1369), AGCgugagau (SEQ ID NO: 3598), CCAgugagug (SEQ ID NO: 1565), AGGguagaug (SEQ ID NO: 3599), UGGguguguc (SEQ ID NO: 2888), AUCgcgugag (SEQ ID NO: 3600), AGGguaagcc (SEQ ID NO: 3601), AGGguagcag (SEQ ID NO: 3602), UUCguuuccg (SEQ ID NO: 3603), AAGguaagcg (SEQ ID NO: 147), UGGguaagcc (SEQ ID NO: 2837), CAGguauggc (SEQ ID NO: 3604), UGUguaagua (SEQ ID NO: 2907), AAGguagaga (SEQ ID NO: 3605), ACGguaauaa (SEQ ID NO: 3606), CUGguacggu (SEQ ID NO: 3607), GAGgucacag (SEQ ID NO: 3608), UAUguaaguu (SEQ ID NO: 2656), CUGguacgcc (SEQ ID NO: 3609), CAAguaagau (SEQ ID NO: 1024), CUAgugagua (SEQ ID NO: 1673), CCGguaaccg (SEQ ID NO: 3610), CUUguaaguc (SEQ ID NO: 3611), GUGgugagaa (SEQ ID NO: 2378), ACCguaugua (SEQ ID NO: 3612), GUAguaagug (SEQ ID NO: 2324), UUGgugggua (SEQ ID NO: 3014), CGGguacuuu (SEQ ID NO: 3613), UGGguaaaua (SEQ ID NO: 2825), AGAgugagua (SEQ ID NO: 704), AAGguagguu (SEQ ID NO: 230), AAGguaugcg (SEQ ID NO: 3614), CCUguaggcu (SEQ ID NO: 3615), ACAguagaaa (SEQ ID NO: 3616), CCGguuagua (SEQ ID NO: 3617), CGGguaggcg (SEQ ID NO: 3618), GCAgugagug (SEQ ID NO: 2162), GAGgugaguc (SEQ ID NO: 3619), CUGguagccu (SEQ ID NO: 3620), CAUguaugua (SEQ ID NO: 1533), GAAguaacuu (SEQ ID NO: 3621), GAAguaagau (SEQ ID NO: 3622), AAGguuagau (SEQ ID NO: 417), AAGguaauca (SEQ ID NO: 161), AAUguaugua (SEQ ID NO: 507), UGAguaagau (SEQ ID NO: 2767), AGAgugagca (SEQ ID NO: 703), GUAguucuau (SEQ ID NO: 3623), GAGguaauca (SEQ ID NO: 1898), UAGguaugga (SEQ ID NO: 2548), UAGgugggac (SEQ ID NO: 2612), GAGguacaug (SEQ ID NO: 3624), UGGguaaggc (SEQ ID NO: 3625), CAGguacgcc (SEQ ID NO: 1182), CCAguuacgc (SEQ ID NO: 3626), ACUgugguga (SEQ ID NO: 3627), GAGguaaguc (SEQ ID NO: 1894), AUUguaggug (SEQ ID NO: 3628), ACCgucagug (SEQ ID NO: 3629), AAUgugaggg (SEQ ID NO: 3630), ACUgugagug (SEQ ID NO: 645), UGGguguggu (SEQ ID NO: 3631), AAGguuggga (SEQ ID NO: 445), AAGguuugga (SEQ ID NO: 464), UCCgugagug (SEQ ID NO: 3632), CGGgugagug (SEQ ID NO: 1642), AGAguaagcu (SEQ ID NO: 664), CAGgcaagcu (SEQ ID NO: 3633), UAGguauauu (SEQ ID NO: 2541), AAAguagcag (SEQ ID NO: 3634), GAGguaaccu (SEQ ID NO: 1880), AAGgugggca (SEQ ID NO: 379), AGGgugagua (SEQ ID NO: 795), UGGguaaggu (SEQ ID NO: 2840), CUUgucagug (SEQ ID NO: 3635), UAGgugcgcu (SEQ ID NO: 3636), GAGgcaaauu (SEQ ID NO: 3637), AGGguaccuc (SEQ ID NO: 3638), CAAgugcgua (SEQ ID NO: 3639), AGAguaagac (SEQ ID NO: 660), GUGguaaaua (SEQ ID NO: 3640), GAUguaagcg (SEQ ID NO: 3641), GAGguaaagc (SEQ ID NO: 1871), UAGgugagua (SEQ ID NO: 2596), CAGguaacau (SEQ ID NO: 1130), CCUguacggc (SEQ ID NO: 3642), UAGguauguc (SEQ ID NO: 2552), UAGguccaua (SEQ ID NO: 3643), GAGgugaaaa (SEQ ID NO: 2003), AAAguacuga (SEQ ID NO: 3644), UUGguaagcg (SEQ ID NO: 3645), CAGgcaagcg (SEQ ID NO: 3646), UUUgcagguu (SEQ ID NO: 3647), CAGguuuaua (SEQ ID NO: 3648), CUGguaaagc (SEQ ID NO: 1686), AUGgugagcu (SEQ ID NO: 958), CAGgugguug (SEQ ID NO: 1419), GUAguaaguu (SEQ ID NO: 3649), CAGguaauac (SEQ ID NO: 3650), CAGgcaaggc (SEQ ID NO: 3651), AAGguaauuu (SEQ ID NO: 171), UUUguccgug (SEQ ID NO: 3652), GAGguagguu (SEQ ID NO: 1939), ACCgugagug (SEQ ID NO: 3653), CAAguaagcu (SEQ ID NO: 3654), ACAgugagua (SEQ ID NO: 560), UUGgugagau (SEQ ID NO: 3000), AAGguagucu (SEQ ID NO: 233), CAGguaaagg (SEQ ID NO: 3655), GGGguaugga (SEQ ID NO: 2264), UUUguaagug (SEQ ID NO: 3040), GUGguaagag (SEQ ID NO: 2344), AGUgugaguu (SEQ ID NO: 838), AAGgcaagcg (SEQ ID NO: 3656), UAAgugagua (SEQ ID NO: 2438), AGGgugagug (SEQ ID NO: 797), AGUguacgug (SEQ ID NO: 3657), AGGgugcgua (SEQ ID NO: 3658), GGCgugagcc (SEQ ID NO: 2238), CGAguuauga (SEQ ID NO: 3659), CAGguaaaga (SEQ ID NO: 1122), UUGgugaaga (SEQ ID NO: 3660), AGGguaaugg (SEQ ID NO: 3661), AAGguccaga (SEQ ID NO: 300), AGUgugaguc (SEQ ID NO: 836), CAGguaauuu (SEQ ID NO: 1159), CAGguaacgc (SEQ ID NO: 3662), CUGguacacu (SEQ ID NO: 3663), CUGguuagug (SEQ ID NO: 1782), CAGguacuug (SEQ ID NO: 3664), CACguaagua (SEQ ID NO: 3665), GUGgugegge (SEQ ID NO: 3666), GAGgucaguu (SEQ ID NO: 3667), AUGguaugcc (SEQ ID NO: 932), AAGgugugug (SEQ ID NO: 405), CUGguggguc (SEQ ID NO: 1772), CAGgugaggc (SEQ ID NO: 1342), AAGguuaguc (SEQ ID NO: 423), AAGguagcug (SEQ ID NO: 215), GAGgucagga (SEQ ID NO: 1983), GUUguaggua (SEQ ID NO: 3668), UGGguacaag (SEQ ID NO: 3669), AUGguaggug (SEQ ID NO: 924), GAGguaagcc (SEQ ID NO: 1886), AUGgcaagua (SEQ ID NO: 3670), AAGguauauu (SEQ ID NO: 245), GCGgugagag (SEQ ID NO: 3671), AAGgugcuuc (SEQ ID NO: 3672), UAGguacauc (SEQ ID NO: 3673), ACUgugguaa (SEQ ID NO: 3674), GAGguaggcu (SEQ ID NO: 1933), GAGguaugca (SEQ ID NO: 3675), AGGguaguuc (SEQ ID NO: 3676), CAGguauccu (SEQ ID NO: 1241), AGGguaaguc (SEQ ID NO: 741), AGGgucaguu (SEQ ID NO: 779), CAGguuggga (SEQ ID NO: 3677), CAGguggaua (SEQ ID NO: 3678), GGAguagguu (SEQ ID NO: 2220), GAGguaggau (SEQ ID NO: 3679), GGGguuugug (SEQ ID NO: 3680), UAGguaauug (SEQ ID NO: 3681), AAGguaaccc (SEQ ID NO: 136), ACGguaagaa (SEQ ID NO: 3682), GAGguagggg (SEQ ID NO: 1936), CGAguaggug (SEQ ID NO: 1619), UCCguaagug (SEQ ID NO: 2710), UCGguacagg (SEQ ID NO: 3683), CAAguaagcg (SEQ ID NO: 3684), AAGguccgcg (SEQ ID NO: 3685), AAUgugagua (SEQ ID NO: 523), CAGgugaaug (SEQ ID NO: 3686), GUGguaaggc (SEQ ID NO: 2350), AGAgugagug (SEQ ID NO: 706), UCUguauguc (SEQ ID NO: 3687), UGGgugaguc (SEQ ID NO: 2876), UCGguuagua (SEQ ID NO: 3688), GAUguaugca (SEQ ID NO: 3689), GAGguuggug (SEQ ID NO: 3690), GAGguggggc (SEQ ID NO: 2061), UGGgucaguc (SEQ ID NO: 3691), GCAgugagua (SEQ ID NO: 2161), CAGguugcuu (SEQ ID NO: 3692), AGGguagagu (SEQ ID NO: 3693), UAGgucaggu (SEQ ID NO: 2567), CGCguaugua (SEQ ID NO: 3694), GAGguauuaa (SEQ ID NO: 3695), CAGguaaacu (SEQ ID NO: 3696), AAAguaaguu (SEQ ID NO: 24), GGGgucuggc (SEQ ID NO: 3697), GCUguggggu (SEQ ID NO: 3698), UUGguaaguc (SEQ ID NO: 3699), AAGguagaag (SEQ ID NO: 3700), AAUgugaguc (SEQ ID NO: 524), AAGgucagcu (SEQ ID NO: 288), AAGguaagag (SEQ ID NO: 143), AUGgugagga (SEQ ID NO: 3701), AAGguacuuc (SEQ ID NO: 200), AAGguaagaa (SEQ ID NO: 141), CCGguacagc (SEQ ID NO: 3702), GCGgugcgga (SEQ ID NO: 3703), CAGguacaua (SEQ ID NO: 1168), CUGgugagga (SEQ ID NO: 1755), CUGguaggug (SEQ ID NO: 1731), AACguagguu (SEQ ID NO: 3704), AUGgugugug (SEQ ID NO: 975), UUGguacuau (SEQ ID NO: 3705), CAGgucggug (SEQ ID NO: 1300), CAGgcauggg (SEQ ID NO: 3706), AUGguaucuu (SEQ ID NO: 929), AAGguaacua (SEQ ID NO: 137), CAGgugggcg (SEQ ID NO: 3707), CACgugagga (SEQ ID NO: 3708), AAGgugguuc (SEQ ID NO: 392), UGGgcauucu (SEQ ID NO: 3709), AUGguaagcc (SEQ ID NO: 894), AGGgucagug (SEQ ID NO: 778), AGAguacgua (SEQ ID NO: 3710), AAGguaggca (SEQ ID NO: 220), AAGguauuca (SEQ ID NO: 3711), CAGguagauu (SEQ ID NO: 1202), GAGguauuua (SEQ ID NO: 1972), GAGgucuaca (SEQ ID NO: 3712), GUUguagguc (SEQ ID NO: 3713), CAGguacucg (SEQ ID NO: 3714), GUCguauguu (SEQ ID NO: 3715), AAGguacuuu (SEQ ID NO: 202), AGAgugagau (SEQ ID NO: 702), AGUguuggua (SEQ ID NO: 3716), AAUgugagug (SEQ ID NO: 525), AAGguagauu (SEQ ID NO: 3717), AUGguuugua (SEQ ID NO: 988), GAGgccccag (SEQ ID NO: 3718), AUGgucaguu (SEQ ID NO: 3719), UCUguaagga (SEQ ID NO: 3720), CAGgucgggc (SEQ ID NO: 3721), CAGguaagcc (SEQ ID NO: 1142), UAGgucagug (SEQ ID NO: 2569), AGAguaggaa (SEQ ID NO: 683), CUGguacuuc (SEQ ID NO: 3722), CUCguaagca (SEQ ID NO: 1674), CAGguaacua (SEQ ID NO: 1134), CAGguggcug (SEQ ID NO: 1401), UGGguccgua (SEQ ID NO: 3723), GAGguugugc (SEQ ID NO: 3724), CAGgugcgcg (SEQ ID NO: 1377), AAAguauggc (SEQ ID NO: 3725), UGAguacgua (SEQ ID NO: 2779), CUGguacgga (SEQ ID NO: 3726), CAAgugaccu (SEQ ID NO: 3727), AAGgugaugu (SEQ ID NO: 356), AAGgucugca (SEQ ID NO: 3728), AAAguuugua (SEQ ID NO: 75), AAGgugagca (SEQ ID NO: 339), GAUguaagcc (SEQ ID NO: 2119), CAAguaauuu (SEQ ID NO: 1035), CAGgugugug (SEQ ID NO: 1442), UGGgugaggg (SEQ ID NO: 2874), AAGgugaccu (SEQ ID NO: 3729), UAGgugugag (SEQ ID NO: 2621), CAGgcagguc (SEQ ID NO: 3730), UCAguaaguu (SEQ ID NO: 2692), UCAgcaguga (SEQ ID NO: 3731), AAGguaccac (SEQ ID NO: 3732), UAAguaggug (SEQ ID NO: 3733), AAGgucagcc (SEQ ID NO: 286), CAGguaacuc (SEQ ID NO: 1135), AAAguaagag (SEQ ID NO: 13), AAGguagaua (SEQ ID NO: 209), AAGgcaaggg (SEQ ID NO: 99), CAGgugucgg (SEQ ID NO: 3734), CAGguggcua (SEQ ID NO: 3735), GAGguugcca (SEQ ID NO: 3736), CAGgccgugg (SEQ ID NO: 3737), UUGguauaug (SEQ ID NO: 3738), GAGguugagu (SEQ ID NO: 3739), GAGguagguc (SEQ ID NO: 3740), GUGguaagac (SEQ ID NO: 2343), UAGguccuuc (SEQ ID NO: 3741), GAGgcaaguc (SEQ ID NO: 3742), GAGguaacau (SEQ ID NO: 3743), CAGguauauc (SEQ ID NO: 1236), UCGguugguu (SEQ ID NO: 3744), CAGgugaacc (SEQ ID NO: 3745), CAGgucuuuu (SEQ ID NO: 3746), CAGgcauggc (SEQ ID NO: 3747), AAAguacuug (SEQ ID NO: 32), CAGgugauuc (SEQ ID NO: 1356), UUGguagguu (SEQ ID NO: 3748), UAUgugagca (SEQ ID NO: 3749), CAGgugagcg (SEQ ID NO: 1339), AAUguaauaa (SEQ ID NO: 3750), AAAguaaggc (SEQ ID NO: 3751), UAGguuuguc (SEQ ID NO: 2644), UAGgugggag (SEQ ID NO: 2613), GAGguaaguu (SEQ ID NO: 3752), AAGguagccg (SEQ ID NO: 3753), CAGguggugc (SEQ ID NO: 3754), UGAgucaguu (SEQ ID NO: 3755), CUGguaggcc (SEQ ID NO: 3756), CAAguaagga (SEQ ID NO: 3757), CGGguaaggc (SEQ ID NO: 3758), AAGgcgagga (SEQ ID NO: 3759), CAGguaguuc (SEQ ID NO: 1230), CAGguaagga (SEQ ID NO: 1143), CCUgugagug (SEQ ID NO: 1610), AAGguaaaug (SEQ ID NO: 132), CCGguaauua (SEQ ID NO: 3760), CAGguaaguu (SEQ ID NO: 1149), AAGgugguca (SEQ ID NO: 3761), CAGguaccuc (SEQ ID NO: 1177), AUCguaagua (SEQ ID NO: 3762), CCGguacaua (SEQ ID NO: 3763), GCGgugagug (SEQ ID NO: 3764), GAGgugguau (SEQ ID NO: 2067), CUGgugugga (SEQ ID NO: 3765), GAGguaauuc (SEQ ID NO: 3766), CAAguacgua (SEQ ID NO: 3767), UCUguaagug (SEQ ID NO: 2746), AAUguaagug (SEQ ID NO: 491), AGGgucuguu (SEQ ID NO: 783), GAGguacugc (SEQ ID NO: 1918), AGGguaaggc (SEQ ID NO: 738), AAGgcaagag (SEQ ID NO: 95), CAGguggguu (SEQ ID NO: 1416), UAGguuagga (SEQ ID NO: 3768), UGAguaagcu (SEQ ID NO: 2769), AGAguaagag (SEQ ID NO: 661), AUGgcaggug (SEQ ID NO: 3769), UAGgcaagua (SEQ ID NO: 3770), AUGguaggua (SEQ ID NO: 923), GCAgcccgca (SEQ ID NO: 3771), ACGguaaacu (SEQ ID NO: 3772), AGGgugaguu (SEQ ID NO: 798), GUAguagucu (SEQ ID NO: 3773), GUGgcugaaa (SEQ ID NO: 3774), CAGguuaguc (SEQ ID NO: 1456), CUGgugagca (SEQ ID NO: 1753), UCAguaagug (SEQ ID NO: 2691), AAAgugauug (SEQ ID NO: 3775), UAGgucugga (SEQ ID NO: 3776), GAGguguuuc (SEQ ID NO: 3777), AAGguaaauu (SEQ ID NO: 133), CAUguacauc (SEQ ID NO: 3778), AAGguuugaa (SEQ ID NO: 3779), CCAgcaagug (SEQ ID NO: 3780), UAGguaauaa (SEQ ID NO: 3781), GAGgcaagug (SEQ ID NO: 1859), CAAgugauuc (SEQ ID NO: 1071), CAGgucgugg (SEQ ID NO: 3782), GAAguaugcc (SEQ ID NO: 3783), UCGgugcccu (SEQ ID NO: 3784), GAGgucaguc (SEQ ID NO: 3785), CAGgugagac (SEQ ID NO: 1334), UUUgucugua (SEQ ID NO: 3786), CAGguagaua (SEQ ID NO: 3787), UGGguaucag (SEQ ID NO: 3788), UAGgugggcu (SEQ ID NO: 2616), AUGgugagau (SEQ ID NO: 3789), CAGguaacac (SEQ ID NO: 3790), CCGguauccu (SEQ ID NO: 3791), UAGguaagcu (SEQ ID NO: 2487), UCAguacauc (SEQ ID NO: 3792), UAGguuugcc (SEQ ID NO: 2642), AUGguaagaa (SEQ ID NO: 889), UUGguaagac (SEQ ID NO: 3793), CCGguuaguc (SEQ ID NO: 3794), GAGguaagaa (SEQ ID NO: 1882), UGGguaaguu (SEQ ID NO: 2844), CCGgugagaa (SEQ ID NO: 1585), CCUgugaggg (SEQ ID NO: 1608), ACGguaggag (SEQ ID NO: 590), ACAguauguc (SEQ ID NO: 3795), CAGguauuaa (SEQ ID NO: 3796), CAGguggauc (SEQ ID NO: 3797), AGAgugcgua (SEQ ID NO: 3798), AAGgugaccg (SEQ ID NO: 3799), AGAguaggug (SEQ ID NO: 687), ACUguaugua (SEQ ID NO: 3800), UAGgucaauu (SEQ ID NO: 3801), AGUguguaag (SEQ ID NO: 3802), CGGguaccuu (SEQ ID NO: 3803), CUAgugaguu (SEQ ID NO: 3804), CUAguaagug (SEQ ID NO: 1666), CAGguacaac (SEQ ID NO: 3805), UAGgugugug (SEQ ID NO: 2627), CAUguacggc (SEQ ID NO: 3806), AUGgugugag (SEQ ID NO: 3807), AGGguggaag (SEQ ID NO: 3808), CAGgugcgag (SEQ ID NO: 3809), UAGgugcucc (SEQ ID NO: 3810), AAGguggugg (SEQ ID NO: 390), AAGgucuguu (SEQ ID NO: 317), CAGgugggcc (SEQ ID NO: 1407), AAGgucaguc (SEQ ID NO: 294), CAGguuuuua (SEQ ID NO: 3811), AACgugaggu (SEQ ID NO: 3812), CGGguaagag (SEQ ID NO: 3813), UUUgucggua (SEQ ID NO: 3814), UAGguuaagu (SEQ ID NO: 3815), GUGguaagaa (SEQ ID NO: 2342), CAGguauugg (SEQ ID NO: 1266), GCUguaaguu (SEQ ID NO: 2196), CUAguaagua (SEQ ID NO: 1664), UCGguaaaua (SEQ ID NO: 3816), CAGguaacuu (SEQ ID NO: 1137), CCUgugagua (SEQ ID NO: 3817), CAGguuauau (SEQ ID NO: 3818), CUGgugaaca (SEQ ID NO: 3819), AAGguauaaa (SEQ ID NO: 238), GAGguaagca (SEQ ID NO: 1885), AAGgugaagc (SEQ ID NO: 324), CAGgugaguu (SEQ ID NO: 1348), UUUgugagua (SEQ ID NO: 3820), CUUguacgcc (SEQ ID NO: 3821), AGAguaagug (SEQ ID NO: 670), UGGguaggug (SEQ ID NO: 2853), UGAgcccugc (SEQ ID NO: 3822), UGUguaugua (SEQ ID NO: 3823), AAGguagagg (SEQ ID NO: 3824), GAGguggggg (SEQ ID NO: 2062), UAGguaauuc (SEQ ID NO: 2502), AAGgcauggu (SEQ ID NO: 3825), AGAguaagca (SEQ ID NO: 663), AAGguaggaa (SEQ ID NO: 217), CAAguaagua (SEQ ID NO: 1026), ACUguaauug (SEQ ID NO: 3826), CAGgucugug (SEQ ID NO: 1311), UCGguaccga (SEQ ID NO: 3827), CUGgugagag (SEQ ID NO: 3828), AAGguuugcu (SEQ ID NO: 463), AUGguaccac (SEQ ID NO: 3829), UAAguuaguu (SEQ ID NO: 3830), CAGguaggac (SEQ ID NO: 1213), AGAgugaggc (SEQ ID NO: 3831), CGAgucagua (SEQ ID NO: 3832), CAGgucugag (SEQ ID NO: 1304), GAGguggugg (SEQ ID NO: 3833), ACGguauugg (SEQ ID NO: 3834), GCUgcgagua (SEQ ID NO: 3835), CUGguaagug (SEQ ID NO: 1708), GUGgugagau (SEQ ID NO: 2379), GGGguuugau (SEQ ID NO: 3836), UCUgugagug (SEQ ID NO: 2762), CUUgucagua (SEQ ID NO: 1801), GAGguaaaac (SEQ ID NO: 1866), UCUguaagau (SEQ ID NO: 2741), CCAguaaguu (SEQ ID NO: 1558), CAGguaaagu (SEQ ID NO: 1124), GCGgugagca (SEQ ID NO: 2179), UAAguaagag (SEQ ID NO: 2416), CUGgcaggug (SEQ ID NO: 3837), GAGguaaggg (SEQ ID NO: 1891), UGAguaaguu (SEQ ID NO: 2775), GAGgugagac (SEQ ID NO: 2015), GCUgucuguu (SEQ ID NO: 3838), AAGguaacaa (SEQ ID NO: 134), GAGguaacgg (SEQ ID NO: 3839), CUGguauucu (SEQ ID NO: 3840), CAAguaacug (SEQ ID NO: 1021), AAGguggggu (SEQ ID NO: 383), UAGguauggc (SEQ ID NO: 2549), CAGguauuuu (SEQ ID NO: 1271), GUGguaaacu (SEQ ID NO: 3841), GAGgucugag (SEQ ID NO: 1998), CUGguaaggu (SEQ ID NO: 1706), CAAguaaguu (SEQ ID NO: 1029), AAGguagacc (SEQ ID NO: 206), GAGgcgagcg (SEQ ID NO: 3842), CUGguaaaua (SEQ ID NO: 1687), UGUguaagcg (SEQ ID NO: 3843), CAGguuaggg (SEQ ID NO: 1453), GGGgugagga (SEQ ID NO: 2280), ACAguaugug (SEQ ID NO: 3844), CCGgugggga (SEQ ID NO: 3845), GAGgucagug (SEQ ID NO: 3846), AGGguaaggu (SEQ ID NO: 3847), ACAguaagua (SEQ ID NO: 546), GGUguaaggu (SEQ ID NO: 3848), GAGguaauaa (SEQ ID NO: 1895), CAGguauucc (SEQ ID NO: 3849), CUGguauaaa (SEQ ID NO: 3850), CCGgucugug (SEQ ID NO: 3851), CAGguaacug (SEQ ID NO: 1136), GCAguaagua (SEQ ID NO: 2147), AAGguagggg (SEQ ID NO: 225), CAAguccacc (SEQ ID NO: 3852), CAAguuggug (SEQ ID NO: 3853), CAGgugcggu (SEQ ID NO: 1379), CAGguaaaau (SEQ ID NO: 3854), ACGguaagga (SEQ ID NO: 3855), UGGguaauaa (SEQ ID NO: 3856), UAGguaagug (SEQ ID NO: 2493), CCGguagguu (SEQ ID NO: 3857), AGAguaugga (SEQ ID NO: 3858), CUCgugaguc (SEQ ID NO: 3859), AAAgccggug (SEQ ID NO: 3860), UUGguaauuu (SEQ ID NO: 2970), GAGguaaaag (SEQ ID NO: 1867), CCUgugugag (SEQ ID NO: 3861), AAAguaagga (SEQ ID NO: 18), UGAgugagug (SEQ ID NO: 2800), AAGguacaug (SEQ ID NO: 180), CCGguaaaug (SEQ ID NO: 3862), CAGgugaagc (SEQ ID NO: 3863), CAGguacccg (SEQ ID NO: 1173), GAGguaaggc (SEQ ID NO: 1890), UUUguauguu (SEQ ID NO: 3049), CAGgugcucc (SEQ ID NO: 1386), UCGguagguc (SEQ ID NO: 3864), CGGgugaggc (SEQ ID NO: 3865), AAGguaauua (SEQ ID NO: 168), ACUgugaguc (SEQ ID NO: 644), AAGgucagca (SEQ ID NO: 285), GUGgugagug (SEQ ID NO: 2384), CAUguccacc (SEQ ID NO: 3866), AAGgugaccc (SEQ ID NO: 3867), CGGguuagua (SEQ ID NO: 3868), GCGguaguaa (SEQ ID NO: 3869), GCUguaggua (SEQ ID NO: 3870), CCUguugagu (SEQ ID NO: 3871), UAGgucuggc (SEQ ID NO: 2577), GAUgugagcc (SEQ ID NO: 2131), CUUgugagua (SEQ ID NO: 1802), CUGguguguu (SEQ ID NO: 1780), GAGgcaugug (SEQ ID NO: 1863), CAGgcaagag (SEQ ID NO: 1101), UUGguaagaa (SEQ ID NO: 2957), GAGguguggg (SEQ ID NO: 2075), GAGguauuuu (SEQ ID NO: 1975), CAGguaguaa (SEQ ID NO: 1224), AGGguaagac (SEQ ID NO: 3872), UUUguaggca (SEQ ID NO: 3873), AGGgugagau (SEQ ID NO: 3874), GAGguuugua (SEQ ID NO: 2110), AAGgugagug (SEQ ID NO: 349), GAGgugggag (SEQ ID NO: 2055), AAGgugagaa (SEQ ID NO: 335), CUGguaagag (SEQ ID NO: 1698), AUAguaaaga (SEQ ID NO: 3875), GAUgugaguc (SEQ ID NO: 2134), AAGgugcagg (SEQ ID NO: 3876), CAGgucuguc (SEQ ID NO: 1310), GAGgugauuu (SEQ ID NO: 3877), CAGguuggcu (SEQ ID NO: 3878), CGGguauggg (SEQ ID NO: 3879), AUGguccauc (SEQ ID NO: 3880), CCGguuggug (SEQ ID NO: 3881), GGAguaaguc (SEQ ID NO: 3882), AAUguaagga (SEQ ID NO: 488), CAGguuuguu (SEQ ID NO: 1510), UAGgugugua (SEQ ID NO: 2626), UAUgucuuug (SEQ ID NO: 3883), ACGguacuuc (SEQ ID NO: 3884), AAGgcacgcg (SEQ ID NO: 3885), CUGguaaacc (SEQ ID NO: 1684), CUUgugggua (SEQ ID NO: 3886), UGAguaaguc (SEQ ID NO: 2773), CUGgugggug (SEQ ID NO: 1773), GAGguggaga (SEQ ID NO: 3887), GUGguggcug (SEQ ID NO: 3888), GUGguaagug (SEQ ID NO: 2353), AACgugagua (SEQ ID NO: 3889), GAAgcuguaa (SEQ ID NO: 3890), CGGguaucuu (SEQ ID NO: 3891), CAGgugucag (SEQ ID NO: 1424), AAUguacgca (SEQ ID NO: 3892), CCGgugggua (SEQ ID NO: 3893), UGGgugaggu (SEQ ID NO: 3894), AAGguauguu (SEQ ID NO: 266), CAGguauguu (SEQ ID NO: 1261), CAGguuugcu (SEQ ID NO: 1505), UUGguaaguu (SEQ ID NO: 2964), CAGguaguug (SEQ ID NO: 1231), CCUgugaaua (SEQ ID NO: 3895), GCUgugugug (SEQ ID NO: 3896), CAAguaauuc (SEQ ID NO: 1033), AGGguaaugu (SEQ ID NO: 3897), GCUgugaguc (SEQ ID NO: 2205), ACCguaaguu (SEQ ID NO: 3898), CGUguaagua (SEQ ID NO: 3899), GGGguaaguc (SEQ ID NO: 3900), AAUguaugau (SEQ ID NO: 3901), AAUgugauua (SEQ ID NO: 3902), UCAguaagaa (SEQ ID NO: 2682), CAGguccguc (SEQ ID NO: 3903), GAAguauuga (SEQ ID NO: 3904), UUGguaagga (SEQ ID NO: 2960), CAGgucgguu (SEQ ID NO: 3905), UAGguuagug (SEQ ID NO: 2635), ACGguaaaac (SEQ ID NO: 577), AAGguagguc (SEQ ID NO: 228), UACgugagua (SEQ ID NO: 3906), UUGguaagca (SEQ ID NO: 3907), GCGgugaguc (SEQ ID NO: 3908), GAAguaaggg (SEQ ID NO: 3909), CGCgugaguu (SEQ ID NO: 3910), CAGguacccc (SEQ ID NO: 3911), UCUguaagac (SEQ ID NO: 3912), GAGgugggca (SEQ ID NO: 2057), AAUguaagac (SEQ ID NO: 3913), CAGgcaaggg (SEQ ID NO: 3914), CAAguaacua (SEQ ID NO: 1020), AAAguuuguc (SEQ ID NO: 3915), CAGguacugu (SEQ ID NO: 1193), AAGgucccuc (SEQ ID NO: 303), UCGguaaguc (SEQ ID NO: 3916), UGGgugagug (SEQ ID NO: 2877), CUUgugagau (SEQ ID NO: 3917), AGAgugagcu (SEQ ID NO: 3918), UAAgugggga (SEQ ID NO: 3919), UAGguaggga (SEQ ID NO: 2522), CAGguuagcc (SEQ ID NO: 1452), AGGguaauca (SEQ ID NO: 3920), AAGguucagc (SEQ ID NO: 3921), UGGgugggug (SEQ ID NO: 2885), CAGguuguga (SEQ ID NO: 1494), AAGguaagug (SEQ ID NO: 155), CAUgugcgua (SEQ ID NO: 1543), CCGguauauu (SEQ ID NO: 3922), ACCguaugug (SEQ ID NO: 3923), CAGguauagu (SEQ ID NO: 3924), CAGguauuac (SEQ ID NO: 3925), CAGgugcagg (SEQ ID NO: 1364), GUGgugagcu (SEQ ID NO: 2381), AAGguaacau (SEQ ID NO: 135), CUGgugaugg (SEQ ID NO: 3926), AUGguaaaug (SEQ ID NO: 882), CCGgugagca (SEQ ID NO: 3927), AAGguaaacc (SEQ ID NO: 124), AAGguacugg (SEQ ID NO: 3928), GCGgucagga (SEQ ID NO: 3929), CUGgucaggg (SEQ ID NO: 3930), AAAguacguu (SEQ ID NO: 3931), AGAguagguu (SEQ ID NO: 688), AGGguaagcu (SEQ ID NO: 3932), AUUgugagua (SEQ ID NO: 1009), CCGgccacca (SEQ ID NO: 3933), GAGguaacuu (SEQ ID NO: 1881), GAGguaugaa (SEQ ID NO: 1956), CAGgucagac (SEQ ID NO: 1276), UAGgcgugug (SEQ ID NO: 2462), AGGguaaguu (SEQ ID NO: 743), CAGgcaugag (SEQ ID NO: 1111), CAGguaacgu (SEQ ID NO: 1133), CAGgcgagca (SEQ ID NO: 3934), UAGguauggu (SEQ ID NO: 2550), AGAguaggau (SEQ ID NO: 3935), CUGguuucaa (SEQ ID NO: 3936), GAGguaaacu (SEQ ID NO: 3937), CAGgcaugca (SEQ ID NO: 1112), UUGguaaucu (SEQ ID NO: 3938), AGGgcagaau (SEQ ID NO: 3939), AUGguaaaac (SEQ ID NO: 877), GCUgcaggug (SEQ ID NO: 3940), GAAgcacgug (SEQ ID NO: 3941), CAUguaaaca (SEQ ID NO: 3942), UGGguaagau (SEQ ID NO: 2835), AGGguagcua (SEQ ID NO: 3943), AGGguggggu (SEQ ID NO: 800), CCUguaaguu (SEQ ID NO: 1600), UGAgugaguu (SEQ ID NO: 2801), GGAguaugua (SEQ ID NO: 3944), CAGgugaccu (SEQ ID NO: 1328), AAAguacgga (SEQ ID NO: 3945), GAGguacaga (SEQ ID NO: 1906), GAUguaggua (SEQ ID NO: 2125), GGGguaauug (SEQ ID NO: 3946), UAGguggguu (SEQ ID NO: 2617), GUGguacgua (SEQ ID NO: 3947), AAGguacagc (SEQ ID NO: 3948), GAGgugaaga (SEQ ID NO: 3949), GGGguaagca (SEQ ID NO: 2246), UGAguagguc (SEQ ID NO: 3950), GGGguaaguu (SEQ ID NO: 2253), AUUgugaguu (SEQ ID NO: 1011), UCAguaagac (SEQ ID NO: 3951), AGUgugagcu (SEQ ID NO: 834), AAGgcaaaac (SEQ ID NO: 3952), CUGgugaguc (SEQ ID NO: 1760), AAGgucucug (SEQ ID NO: 310), GAGgcugugc (SEQ ID NO: 3953), AGAgugagac (SEQ ID NO: 700), GAGgugaugu (SEQ ID NO: 2033), AGAguauggu (SEQ ID NO: 3954), UGGguggguc (SEQ ID NO: 2884), GCUgcugagc (SEQ ID NO: 3955), CAGguagcug (SEQ ID NO: 1210), UAGgucagaa (SEQ ID NO: 3956), CCGguaggug (SEQ ID NO: 3957), GCAguaugau (SEQ ID NO: 3958), CAGguuucag (SEQ ID NO: 3959), GAGguuugcc (SEQ ID NO: 3960), GGGguggggg (SEQ ID NO: 3961), AAGguacaua (SEQ ID NO: 179), UGGguguguu (SEQ ID NO: 2890), AGAguaaggc (SEQ ID NO: 666), GCGguuagug (SEQ ID NO: 3962), AAGgugacuu (SEQ ID NO: 334), AUGguaagau (SEQ ID NO: 892), AUGguaguug (SEQ ID NO: 3963), CAUguaagac (SEQ ID NO: 3964), CUGguaugua (SEQ ID NO: 1736), UUCguaagga (SEQ ID NO: 3965), GAAguaugac (SEQ ID NO: 3966), CGGguaauuc (SEQ ID NO: 1627), UGGguaacuu (SEQ ID NO: 2831), CAGgugccua (SEQ ID NO: 1372), CAUguagggc (SEQ ID NO: 3967), ACCgucagga (SEQ ID NO: 3968), CGUguucgau (SEQ ID NO: 3969), GAGgcaggac (SEQ ID NO: 3970), UAGguaauau (SEQ ID NO: 2496), UCGguauacu (SEQ ID NO: 3971), UAGguugugc (SEQ ID NO: 3972), CCGgugaguc (SEQ ID NO: 3973), CAGgugccaa (SEQ ID NO: 1368), CAGgugaugc (SEQ ID NO: 1352), AAGgugagga (SEQ ID NO: 343), GUGgugaggg (SEQ ID NO: 3974), UGGgucagua (SEQ ID NO: 3975), GAGgucaggg (SEQ ID NO: 1985), UAGguacgua (SEQ ID NO: 2511), GAGgcaagag (SEQ ID NO: 1857), CCUguuggua (SEQ ID NO: 3976), GAGguaucca (SEQ ID NO: 3977), UAAguaagcu (SEQ ID NO: 2419), AAGgucaguu (SEQ ID NO: 296), AAAguuaaag (SEQ ID NO: 3978), GAGgugcuau (SEQ ID NO: 3979), ACGguaaguu (SEQ ID NO: 581), CUGgugaggg (SEQ ID NO: 1757), GAGguuaugu (SEQ ID NO: 2091), CUUgugugca (SEQ ID NO: 3980), UGAgcugggg (SEQ ID NO: 3981), AAGguauagu (SEQ ID NO: 3982), UAGguaaaac (SEQ ID NO: 2464), GGGgugaggu (SEQ ID NO: 3983), GAGgcaagca (SEQ ID NO: 3984), GGAguaacgu (SEQ ID NO: 3985), AGAguaagua (SEQ ID NO: 3986), AAAguaagua (SEQ ID NO: 21), GAGgcaacca (SEQ ID NO: 3987), UGUguaaguu (SEQ ID NO: 2909), UAGgugaggc (SEQ ID NO: 2594), ACAguaagaa (SEQ ID NO: 544), UGAguaagug (SEQ ID NO: 2774), CAAgucagua (SEQ ID NO: 1057), AGGguaaaug (SEQ ID NO: 3988), AAGguaugca (SEQ ID NO: 257), GCUgugcgug (SEQ ID NO: 3989), GAGguucgcc (SEQ ID NO: 3990), AAGgcuugca (SEQ ID NO: 3991), CAGgcaagug (SEQ ID NO: 1104), AUAguaaguc (SEQ ID NO: 3992), UUGguaggua (SEQ ID NO: 2978), GCAgcaggua (SEQ ID NO: 3993), AAGguauauc (SEQ ID NO: 243), AGCguaagcc (SEQ ID NO: 3994), CUGguucgaa (SEQ ID NO: 3995), ACGgugggug (SEQ ID NO: 612), CUGgucauug (SEQ ID NO: 3996), CAGgucagga (SEQ ID NO: 1280), CAAgugagac (SEQ ID NO: 1062), GAGguacugg (SEQ ID NO: 1919), GAGguguagu (SEQ ID NO: 3997), GAGguguccu (SEQ ID NO: 3998), CAGgugcgua (SEQ ID NO: 1380), AGUgcccuga (SEQ ID NO: 3999), AUGgugaguc (SEQ ID NO: 962), UGUgugugua (SEQ ID NO: 4000), CAGguaugcu (SEQ ID NO: 1254), CUGguacagu (SEQ ID NO: 4001), UUGguacgua (SEQ ID NO: 4002), UCUguacgua (SEQ ID NO: 4003), UAAguaauuc (SEQ ID NO: 4004), CACguaugug (SEQ ID NO: 4005), CAGgcaagua (SEQ ID NO: 1103), UCGgugagug (SEQ ID NO: 4006), GGUgugaguc (SEQ ID NO: 2315), UCUguaagcu (SEQ ID NO: 2743), AAGguucaga (SEQ ID NO: 4007), AGGguacuuc (SEQ ID NO: 4008), GCGgcagguu (SEQ ID NO: 4009), GAGgcccgug (SEQ ID NO: 4010), CAGguauaaa (SEQ ID NO: 4011), AUGgucaagu (SEQ ID NO: 4012), AAGgugagua (SEQ ID NO: 347), GUGguuuguu (SEQ ID NO: 4013), AGAgugagga (SEQ ID NO: 4014), GAGguaugac (SEQ ID NO: 1957), UAGgcgugag (SEQ ID NO: 4015), AAGguacucc (SEQ ID NO: 4016), UGAgugagga (SEQ ID NO: 2798), GAGguaugau (SEQ ID NO: 4017), GGGgucggua (SEQ ID NO: 4018), ACGguaugca (SEQ ID NO: 4019), CAGguaccac (SEQ ID NO: 1171), UAAguaccug (SEQ ID NO: 4020), AGGgugggcu (SEQ ID NO: 4021), CUGgucuguu (SEQ ID NO: 4022), UAGgucagag (SEQ ID NO: 4023), AAGguguguu (SEQ ID NO: 406), CUGgucagug (SEQ ID NO: 4024), AAGgugggac (SEQ ID NO: 4025), GUGguaguag (SEQ ID NO: 4026), CUAguuuagg (SEQ ID NO: 4027), CCCgccccau (SEQ ID NO: 4028), GCUguacugc (SEQ ID NO: 4029), GAGguaauau (SEQ ID NO: 1897), UAGguuggug (SEQ ID NO: 4030), AAGguccaac (SEQ ID NO: 4031), UAGgugagga (SEQ ID NO: 2593), GUGguaaguu (SEQ ID NO: 2354), AGUgugagag (SEQ ID NO: 831), AAUguacaug (SEQ ID NO: 497), UUGgcaggug (SEQ ID NO: 4032), UAGguuauug (SEQ ID NO: 4033), CAGguacuga (SEQ ID NO: 1191), GCGguggguc (SEQ ID NO: 4034), UGUguaagau (SEQ ID NO: 4035), GAGgugagua (SEQ ID NO: 2025), GCAgccccgg (SEQ ID NO: 4036), CAGgugcuaa (SEQ ID NO: 4037), AGUguaagag (SEQ ID NO: 815), CAGguacauc (SEQ ID NO: 4038), CAGgugggac (SEQ ID NO: 1403), AGGguaaaua (SEQ ID NO: 727), UAAguaauua (SEQ ID NO: 4039), CAGguaaccg (SEQ ID NO: 1132), AAGguuugca (SEQ ID NO: 461), UAGgugguuu (SEQ ID NO: 4040), CAGgugaccg (SEQ ID NO: 1327), UGUguaagcu (SEQ ID NO: 4041), GGAgugaguc (SEQ ID NO: 2227), AGGguaggag (SEQ ID NO: 752), AGGgugggug (SEQ ID NO: 802), AAGgucugag (SEQ ID NO: 313), GAUguaauau (SEQ ID NO: 4042), GGGguaauua (SEQ ID NO: 4043), UAGguaggua (SEQ ID NO: 2524), GAGgcaagua (SEQ ID NO: 1858), GAGguaagga (SEQ ID NO: 1889), UAGguacuac (SEQ ID NO: 4044), UCGgugggug (SEQ ID NO: 4045), AAGgugugga (SEQ ID NO: 401), CAGgucugcc (SEQ ID NO: 1305), UAAgugagcc (SEQ ID NO: 4046), GAAguaaguu (SEQ ID NO: 1820), GAAguaagcc (SEQ ID NO: 1815), UAGgugcgac (SEQ ID NO: 4047), GAGguauggc (SEQ ID NO: 4048), GCAguaagaa (SEQ ID NO: 2145), CAGgugugga (SEQ ID NO: 1438), UUGguaacgu (SEQ ID NO: 4049), GCUguaaaaa (SEQ ID NO: 4050), UUGguuagua (SEQ ID NO: 4051), AUAguaaggg (SEQ ID NO: 4052), UUGguacuag (SEQ ID NO: 4053), CGGgcagccg (SEQ ID NO: 4054), CAGgugcugg (SEQ ID NO: 1389), UAUgugaguu (SEQ ID NO: 2673), CAGgucuggg (SEQ ID NO: 4055), UAAguaagaa (SEQ ID NO: 2415), AAGguuauua (SEQ ID NO: 4056), AGAguaaagc (SEQ ID NO: 4057), AGAgugugag (SEQ ID NO: 4058), UAGgugcgag (SEQ ID NO: 4059), CAAguaaacg (SEQ ID NO: 4060), AAGguacgua (SEQ ID NO: 4061), CUGgugagua (SEQ ID NO: 1759), CCAguaugua (SEQ ID NO: 4062), UUGgugagug (SEQ ID NO: 3006), UGAguaagua (SEQ ID NO: 2772), GAGguuagca (SEQ ID NO: 4063), GUGguaagcc (SEQ ID NO: 4064), CUGguauggc (SEQ ID NO: 1734), AAAguaacac (SEQ ID NO: 8), CAGguacuaa (SEQ ID NO: 1186), UCUguaaguu (SEQ ID NO: 2747), GAGgugaggg (SEQ ID NO: 2024), ACUgugggua (SEQ ID NO: 647), GAUguuugug (SEQ ID NO: 4065), CAGgugucaa (SEQ ID NO: 4066), CAGgucacca (SEQ ID NO: 4067), CCGgugagua (SEQ ID NO: 4068), UUGguaaaua (SEQ ID NO: 4069), CAGguggggg (SEQ ID NO: 1411), ACUgcaggug (SEQ ID NO: 4070), UAGguauguu (SEQ ID NO: 2554), GGAgcaagug (SEQ ID NO: 4071), UCGgugccuc (SEQ ID NO: 4072), CAAguaacuu (SEQ ID NO: 4073), GAGguaacca (SEQ ID NO: 1879), CAGguaauau (SEQ ID NO: 1151), GGAguaagaa (SEQ ID NO: 4074), GAGguaccuu (SEQ ID NO: 1914), AGGguaagga (SEQ ID NO: 737), CCUgugaguc (SEQ ID NO: 1609), GAGguaaugg (SEQ ID NO: 1900), AUGguguguc (SEQ ID NO: 4075), GGGgugagua (SEQ ID NO: 4076), AGGgucaggu (SEQ ID NO: 4077), UGGguaaggg (SEQ ID NO: 2839), AGGguagguu (SEQ ID NO: 759), AUAgugaguu (SEQ ID NO: 4078), CCCguaggcu (SEQ ID NO: 4079), ACAguaugua (SEQ ID NO: 553), GACgugugua (SEQ ID NO: 4080), GCGgugagga (SEQ ID NO: 4081), CAGgugaccc (SEQ ID NO: 1326), UAAguuuagu (SEQ ID NO: 4082), ACAguugagu (SEQ ID NO: 570), CGGgugaggg (SEQ ID NO: 1639), CAGguggauu (SEQ ID NO: 1398), CGGguagagg (SEQ ID NO: 4083), UAGgugcgug (SEQ ID NO: 2608), GGGguaagaa (SEQ ID NO: 2243), GAGguggggu (SEQ ID NO: 4084), CACguggguu (SEQ ID NO: 4085), ACGguaauug (SEQ ID NO: 4086), AGAgugaguc (SEQ ID NO: 705), UUGgcuccaa (SEQ ID NO: 4087), AAGgugaugc (SEQ ID NO: 355), AAGguugguc (SEQ ID NO: 448), AGCguaaguu (SEQ ID NO: 4088), AUUguaugua (SEQ ID NO: 1006), UCAguuaagu (SEQ ID NO: 4089), CAAguacgug (SEQ ID NO: 4090), CAGgugcgug (SEQ ID NO: 1382), CAGguaggua (SEQ ID NO: 1220), AUGguggggu (SEQ ID NO: 4091), AUGgugaguu (SEQ ID NO: 964), CAGguaauca (SEQ ID NO: 4092), AAGguagggu (SEQ ID NO: 226), CAGgccaagg (SEQ ID NO: 4093), GUGgugagag (SEQ ID NO: 4094), AAGguuggug (SEQ ID NO: 449), CAGguacucu (SEQ ID NO: 1190), UAGgcaugug (SEQ ID NO: 4095), UUGguaccuu (SEQ ID NO: 4096), CUGgugugcc (SEQ ID NO: 4097), ACAguugcca (SEQ ID NO: 4098), UUGguaauau (SEQ ID NO: 4099), GAGgugcaug (SEQ ID NO: 4100), UUGguuugua (SEQ ID NO: 3028), UUGguaagug (SEQ ID NO: 2963), UGUgugugug (SEQ ID NO: 4101), GUGguuugua (SEQ ID NO: 2398), GCGguacaca (SEQ ID NO: 4102), AGAguaugcu (SEQ ID NO: 4103), UUUguaagua (SEQ ID NO: 3038), UCUgugcggg (SEQ ID NO: 4104), AAGgucagug (SEQ ID NO: 295), GAGguaggaa (SEQ ID NO: 1930), GCGguuagca (SEQ ID NO: 4105), AGGgugaggg (SEQ ID NO: 793), GAAgugagua (SEQ ID NO: 4106), CAGgugacag (SEQ ID NO: 4107), AAGgugauua (SEQ ID NO: 357), GAGgccagcc (SEQ ID NO: 4108), GAGgucuccu (SEQ ID NO: 4109), UAGguauuac (SEQ ID NO: 2556), CAUguaagag (SEQ ID NO: 1519), CUGguagggc (SEQ ID NO: 4110), GAAguaagua (SEQ ID NO: 1818), CGGguaagug (SEQ ID NO: 4111), CAGguaaucu (SEQ ID NO: 4112), GUGguaggua (SEQ ID NO: 4113), CAGgugggua (SEQ ID NO: 1413), AAGgccagug (SEQ ID NO: 4114), AAAgugaauc (SEQ ID NO: 4115), ACGguuacgu (SEQ ID NO: 4116), AUGguaggaa (SEQ ID NO: 917), CGGgugagac (SEQ ID NO: 4117), GAGguuggaa (SEQ ID NO: 2099), UGGgugagcc (SEQ ID NO: 2871), CCAgugagua (SEQ ID NO: 1564), CUAguacgag (SEQ ID NO: 4118), CAGguaugac (SEQ ID NO: 1248), GCUgugaggu (SEQ ID NO: 4119), CUGguaugaa (SEQ ID NO: 4120), GGUguacgac (SEQ ID NO: 4121), CUUgugagug (SEQ ID NO: 4122), GUGgugagca (SEQ ID NO: 2380), CUGguaacuu (SEQ ID NO: 1696), CAGguacuau (SEQ ID NO: 1188), AGGguaaggg (SEQ ID NO: 739), UUGguuaguu (SEQ ID NO: 3025), GGUguaagca (SEQ ID NO: 2302), UCGgugagga (SEQ ID NO: 4123), UGGguaaaca (SEQ ID NO: 4124), UCGguacgug (SEQ ID NO: 4125), UAGguagcag (SEQ ID NO: 4126), CUGguaaggc (SEQ ID NO: 1704), GUGguaagga (SEQ ID NO: 2349), UAAguaagca (SEQ ID NO: 2418), GAGguuccaa (SEQ ID NO: 4127), CUGguaugga (SEQ ID NO: 4128), GGGgugggua (SEQ ID NO: 2288), CAGguuuccc (SEQ ID NO: 4129), CAGgucucug (SEQ ID NO: 4130), GAGgugagga (SEQ ID NO: 2022), CUUguggguu (SEQ ID NO: 1805), AUGgugagac (SEQ ID NO: 953), CAGgugaagg (SEQ ID NO: 1319), GCGguagggg (SEQ ID NO: 4131), GUUguuuccc (SEQ ID NO: 4132), AAAgcaucca (SEQ ID NO: 4133), GUGguagguu (SEQ ID NO: 2367), AAGgugugaa (SEQ ID NO: 398), CAGguacagu (SEQ ID NO: 1167), AAGguaccaa (SEQ ID NO: 182), UUGguaauug (SEQ ID NO: 2969), AAGgugcuca (SEQ ID NO: 4134), AAGguucaac (SEQ ID NO: 4135), CAGguuuaca (SEQ ID NO: 4136), GCUguaagug (SEQ ID NO: 2195), AGGguauguc (SEQ ID NO: 769), GAGgucgggg (SEQ ID NO: 1996), AAGgugccug (SEQ ID NO: 363), AAGguaaaaa (SEQ ID NO: 119), GUGgugaguu (SEQ ID NO: 2385), UAGguaagaa (SEQ ID NO: 4137), AGGguauccu (SEQ ID NO: 4138), GUGguaauau (SEQ ID NO: 4139), UCUguaagua (SEQ ID NO: 2744), UGGguaugga (SEQ ID NO: 4140), AUGguaugga (SEQ ID NO: 935), GACgugagcc (SEQ ID NO: 1854), CUGguuuggc (SEQ ID NO: 4141), AUGguauauc (SEQ ID NO: 4142), AAAguaaacu (SEQ ID NO: 4143), AGCgugagug (SEQ ID NO: 721), CUGguauaga (SEQ ID NO: 4144), CAGgugggga (SEQ ID NO: 1409), AGAguauguu (SEQ ID NO: 696), UAGguacuug (SEQ ID NO: 4145), GCAguaggug (SEQ ID NO: 4146), AGUguauguc (SEQ ID NO: 4147), AAGguuaagc (SEQ ID NO: 413), CUGguggccu (SEQ ID NO: 4148), GAAgugaguc (SEQ ID NO: 1839), UUGguguaag (SEQ ID NO: 4149), CAGguaagaa (SEQ ID NO: 1138), CGGgucucgg (SEQ ID NO: 4150), GAGgugcaca (SEQ ID NO: 2035), CUCguuaguu (SEQ ID NO: 4151), AAGgugauca (SEQ ID NO: 352), UAUguaagaa (SEQ ID NO: 2649), GAGgugcuug (SEQ ID NO: 2047), CAGgugguca (SEQ ID NO: 4152), ACGguaaguc (SEQ ID NO: 4153), ACAguaaugu (SEQ ID NO: 4154), CCUguaaggu (SEQ ID NO: 4155), GAGguuaagu (SEQ ID NO: 4156), UCGguaugug (SEQ ID NO: 2725), UGGguauguu (SEQ ID NO: 2863), AAGguauuac (SEQ ID NO: 268), CAGgugaggg (SEQ ID NO: 1343), UUGguaaaca (SEQ ID NO: 4157), AAGguagugu (SEQ ID NO: 4158), GAGguguggc (SEQ ID NO: 4159), CAGguacgga (SEQ ID NO: 4160), AAGgucauca (SEQ ID NO: 4161), CAAguaggca (SEQ ID NO: 4162), CAGgugaaac (SEQ ID NO: 4163), CAGguacugc (SEQ ID NO: 1192), AAUgcaagug (SEQ ID NO: 4164), CAUguaauuc (SEQ ID NO: 4165), AAGguaugcu (SEQ ID NO: 259), CUGgugaguu (SEQ ID NO: 1762), CAGgugguuu (SEQ ID NO: 4166), UGUgugagua (SEQ ID NO: 2922), AAGgucggug (SEQ ID NO: 4167), AUGguaaauu (SEQ ID NO: 883), AGGguauuac (SEQ ID NO: 771), AGUguaugga (SEQ ID NO: 4168), AACguaagau (SEQ ID NO: 4169), GUGguaaggu (SEQ ID NO: 4170), ACUguuagua (SEQ ID NO: 4171), CAGguaucag (SEQ ID NO: 1239), AAGguuaguu (SEQ ID NO: 425), CUGgugagcu (SEQ ID NO: 1754), UUGgugagcu (SEQ ID NO: 4172), UGUguacgua (SEQ ID NO: 4173), GAGgucagcc (SEQ ID NO: 4174), GAGguagaau (SEQ ID NO: 4175), AAGguaugag (SEQ ID NO: 255), UAGguauuuc (SEQ ID NO: 2563), UGUguaacac (SEQ ID NO: 4176), AGUguaaggc (SEQ ID NO: 4177), GAGgucugcu (SEQ ID NO: 4178), AAGguuagca (SEQ ID NO: 418), CAGguaaaug (SEQ ID NO: 1127), AACguaagcu (SEQ ID NO: 4179), CAGgucugca (SEQ ID NO: 4180), CAGguauugu (SEQ ID NO: 1267), GUGguaauuc (SEQ ID NO: 2356), GAGguauaug (SEQ ID NO: 1951), GCCgugagcc (SEQ ID NO: 4181), GAGguaagag (SEQ ID NO: 1883), UGAguaugua (SEQ ID NO: 2787), CAGguaaggg (SEQ ID NO: 1145), GAGguaaauu (SEQ ID NO: 1876), CAGgcaacuu (SEQ ID NO: 4182), UGUguaaguc (SEQ ID NO: 2908), CAGgugcgcu (SEQ ID NO: 4183), CGGguaaacc (SEQ ID NO: 4184), CCGgucaguc (SEQ ID NO: 4185), UAGgugggcg (SEQ ID NO: 4186), GCGgucaguu (SEQ ID NO: 4187), GGGguggguc (SEQ ID NO: 4188), AGCguaauag (SEQ ID NO: 4189), ACGgugaguc (SEQ ID NO: 4190), CUGguacuug (SEQ ID NO: 1722), CAGguuggua (SEQ ID NO: 4191), AGAguaugug (SEQ ID NO: 695), CUGgugggua (SEQ ID NO: 1771), GAGguggcuu (SEQ ID NO: 4192), AUAguauuga (SEQ ID NO: 4193), UGAgucguce (SEQ ID NO: 4194), CAGgugcucu (SEQ ID NO: 4195), UACguaauau (SEQ ID NO: 4196), GCUguccuga (SEQ ID NO: 4197), CAGgcugcac (SEQ ID NO: 4198), CUGgugcgcu (SEQ ID NO: 1766), GCGguaagaa (SEQ ID NO: 4199), UAAguuacuu (SEQ ID NO: 4200), GAAgugagug (SEQ ID NO: 1840), UAGgcaaguc (SEQ ID NO: 2460), UAAguaaaua (SEQ ID NO: 4201), ACGgugagug (SEQ ID NO: 607), CAGguagguu (SEQ ID NO: 1223), GGGguauaac (SEQ ID NO: 4202), GUUgugaguu (SEQ ID NO: 2410), CAUgugagua (SEQ ID NO: 1539), GAGgugcauu (SEQ ID NO: 4203), AAGguuugua (SEQ ID NO: 466), UCGguaaugu (SEQ ID NO: 4204), CGAguaaggg (SEQ ID NO: 1616), GAGgcacgga (SEQ ID NO: 4205), AGGgugugga (SEQ ID NO: 4206), CAGguauggu (SEQ ID NO: 1257), AAGguagaaa (SEQ ID NO: 203), CAGgugccug (SEQ ID NO: 1373), UGGguauaug (SEQ ID NO: 4207), UGAgugagac (SEQ ID NO: 4208), UGGguaauuu (SEQ ID NO: 2847), AUGguaaaua (SEQ ID NO: 881), AAGgcaaagg (SEQ ID NO: 4209), AGUguuuguu (SEQ ID NO: 4210), AUGguauugg (SEQ ID NO: 4211), CUGgugagge (SEQ ID NO: 1756), UUGguaaaau (SEQ ID NO: 2948), ACAgugaguu (SEQ ID NO: 563), CAGgugcugu (SEQ ID NO: 4212), GAGguuaaga (SEQ ID NO: 2080), AGAguaagaa (SEQ ID NO: 659), GAGguccgcg (SEQ ID NO: 4213), GUGgugagga (SEQ ID NO: 2382), CAGgugagcc (SEQ ID NO: 1338), CAGgugacau (SEQ ID NO: 1324), AUGgcaagcu (SEQ ID NO: 4214), UCGguaauau (SEQ ID NO: 4215), CAGgcaacaa (SEQ ID NO: 4216), GGGguaggga (SEQ ID NO: 2257), CUGgucucgc (SEQ ID NO: 4217), UAGguaacga (SEQ ID NO: 4218), CGGguaaggu (SEQ ID NO: 4219), UAGguaaugc (SEQ ID NO: 4220), CAGgcaagaa (SEQ ID NO: 1099), ACAguaggua (SEQ ID NO: 4221), CAAguaugag (SEQ ID NO: 1049), GCUguucgaa (SEQ ID NO: 4222), AAGguuaugc (SEQ ID NO: 4223), GAUgugaguu (SEQ ID NO: 2136), CAGguggaga (SEQ ID NO: 1396), AGAguuaguu (SEQ ID NO: 4224), UGAgugugeg (SEQ ID NO: 4225), GAGguacagc (SEQ ID NO: 1907), CAGguaagac (SEQ ID NO: 1139), CAUgugcuuu (SEQ ID NO: 4226), AGGguguguu (SEQ ID NO: 4227), ACAguuaagg (SEQ ID NO: 4228), ACAgugaggg (SEQ ID NO: 4229), GAUguauacc (SEQ ID NO: 4230), UUAguaagcu (SEQ ID NO: 4231), CAGguaagau (SEQ ID NO: 1141), AGAgcugcgu (SEQ ID NO: 4232), GAGgcaaguu (SEQ ID NO: 1860), GAAguaagug (SEQ ID NO: 1819), AAGgugaaaa (SEQ ID NO: 4233), AAGguaccua (SEQ ID NO: 4234), GAGguaucag (SEQ ID NO: 4235), AUGguaugua (SEQ ID NO: 4236), AAGguaugaa (SEQ ID NO: 253), UUGgugagcc (SEQ ID NO: 4237), AAGguuagga (SEQ ID NO: 420), AGGguaugua (SEQ ID NO: 768), CAGguaccga (SEQ ID NO: 4238), AGAguaaacu (SEQ ID NO: 4239), AAGgugcaua (SEQ ID NO: 4240), AAGguaaugu (SEQ ID NO: 167), CCGgugugug (SEQ ID NO: 4241), AGGguaaauu (SEQ ID NO: 729), GGGguuuggc (SEQ ID NO: 4242), CAGguacacg (SEQ ID NO: 1164), UUGguaacca (SEQ ID NO: 4243), GAGgucaggu (SEQ ID NO: 1986), UCUguuggua (SEQ ID NO: 4244), CAGguuaguu (SEQ ID NO: 1458), UUGguauguc (SEQ ID NO: 4245), AAGgugcguc (SEQ ID NO: 4246), AGGguaagaa (SEQ ID NO: 733), UUUguaagcc (SEQ ID NO: 4247), AAGgucaggu (SEQ ID NO: 292), CUGguaaacu (SEQ ID NO: 4248), UCGguaauuu (SEQ ID NO: 4249), CUGguaggcu (SEQ ID NO: 4250), GAGgucugua (SEQ ID NO: 4251), GAGguacuuu (SEQ ID NO: 1922), CUGguaaagg (SEQ ID NO: 4252), CGGgugugug (SEQ ID NO: 1650), CAGguguggu (SEQ ID NO: 4253), UCGguacguc (SEQ ID NO: 4254), CAGgugccag (SEQ ID NO: 4255), GGGgugagaa (SEQ ID NO: 2275), ACAgcuagua (SEQ ID NO: 4256), AAGguauagc (SEQ ID NO: 4257), CUGguaggag (SEQ ID NO: 4258), GCUguacgua (SEQ ID NO: 4259), AAGguaaagg (SEQ ID NO: 128), CAAgcacgag (SEQ ID NO: 4260), CUAguaagac (SEQ ID NO: 4261), CCCguaagcg (SEQ ID NO: 4262), CAAgugugag (SEQ ID NO: 1078), AUGguaaggg (SEQ ID NO: 897), AAGgugaggg (SEQ ID NO: 345), CAAguaggua (SEQ ID NO: 1041), GGUguugcug (SEQ ID NO: 2321), GAGguacugu (SEQ ID NO: 1920), UAGguaagau (SEQ ID NO: 2484), CAGgugcgaa (SEQ ID NO: 1374), GAGguccagg (SEQ ID NO: 4263), UUGguauaca (SEQ ID NO: 2982), GGAgugagua (SEQ ID NO: 2226), GAGgugagau (SEQ ID NO: 2017), AAGguggggc (SEQ ID NO: 4264), CAGguaaacg (SEQ ID NO: 4265), UCGguaacuu (SEQ ID NO: 4266), CAGguaaauu (SEQ ID NO: 1128), GAGgugcgca (SEQ ID NO: 4267), ACUgugagua (SEQ ID NO: 643), ACGgugugac (SEQ ID NO: 4268), GUGguaaguc (SEQ ID NO: 2352), CAGguaggca (SEQ ID NO: 1215), CAGgucagca (SEQ ID NO: 1277), GUGguaugug (SEQ ID NO: 4269), AAAguaucug (SEQ ID NO: 4270), CGGguaugua (SEQ ID NO: 4271), AAGguaauaa (SEQ ID NO: 157), GAGgugggga (SEQ ID NO: 2060), GCUguaggug (SEQ ID NO: 2197), GAAgugaguu (SEQ ID NO: 1841), AAAguauuua (SEQ ID NO: 4272), UAUguaagua (SEQ ID NO: 2653), ACGguaugag (SEQ ID NO: 4273), CUGgugagug (SEQ ID NO: 1761), AGAguaaaau (SEQ ID NO: 4274), GCUguauggc (SEQ ID NO: 4275), AUGguaaacc (SEQ ID NO: 879), GCAguaauaa (SEQ ID NO: 4276), UAAguauuua (SEQ ID NO: 4277), AAUgucagug (SEQ ID NO: 515), AUUgcaggag (SEQ ID NO: 4278), CCGguaagaa (SEQ ID NO: 4279), AAGgcaaguu (SEQ ID NO: 101), GAGguuuguc (SEQ ID NO: 4280), AAGguaacug (SEQ ID NO: 139), AAAguaugag (SEQ ID NO: 4281), GAUguuagua (SEQ ID NO: 4282), CAGguggguc (SEQ ID NO: 1414), AAGguaccga (SEQ ID NO: 4283), CCAguaauua (SEQ ID NO: 4284), GUGguaugcg (SEQ ID NO: 4285), AUGgugcgcu (SEQ ID NO: 4286), CAGgucuaug (SEQ ID NO: 4287), AAGguauuua (SEQ ID NO: 274), CUAguaagau (SEQ ID NO: 4288), AGAguaauuu (SEQ ID NO: 675), GAGguaacgu (SEQ ID NO: 4289), AAGguagcca (SEQ ID NO: 212), CUGgucccgg (SEQ ID NO: 4290), GAGguccuuc (SEQ ID NO: 4291), ACGgucaccc (SEQ ID NO: 4292), AAGguaauac (SEQ ID NO: 158), CAGgugcaug (SEQ ID NO: 1367), AUGguaauag (SEQ ID NO: 4293), UUUguaacac (SEQ ID NO: 4294), UGGguaugau (SEQ ID NO: 4295), CAGgcccccc (SEQ ID NO: 4296), AGAguaguaa (SEQ ID NO: 4297), AGUguaagaa (SEQ ID NO: 814), GAAguauguu (SEQ ID NO: 1833), CAGgugugca (SEQ ID NO: 1434), UUGgugaggg (SEQ ID NO: 3003), UGGguugguu (SEQ ID NO: 4298), CAGguacgua (SEQ ID NO: 1184), GAGgugcggc (SEQ ID NO: 4299), UCUguacggg (SEQ ID NO: 4300), CGGgugcgug (SEQ ID NO: 4301), UACguaagug (SEQ ID NO: 2455), CAUguaagga (SEQ ID NO: 4302), CAGgugacgg (SEQ ID NO: 1329), GAUguaugcu (SEQ ID NO: 4303), UCUgcaauuc (SEQ ID NO: 4304), UGAguaaggc (SEQ ID NO: 2770), GAGguauauu (SEQ ID NO: 1952), AGAgugaguu (SEQ ID NO: 707), AAGguaagcu (SEQ ID NO: 148), UAGgugaagu (SEQ ID NO: 2580), CAGguuagua (SEQ ID NO: 1455), UAUguaagug (SEQ ID NO: 2655), UUGguggggg (SEQ ID NO: 4305), UGAgcucaaa (SEQ ID NO: 4306), UCGguaugua (SEQ ID NO: 4307), UAAguaugcc (SEQ ID NO: 4308), AAUguaagua (SEQ ID NO: 489), CAGguuugca (SEQ ID NO: 4309), ACGgugagag (SEQ ID NO: 4310), CAGguguuuu (SEQ ID NO: 4311), GUGgugagcc (SEQ ID NO: 4312), AGGguacaua (SEQ ID NO: 4313), UAGguaaccc (SEQ ID NO: 4314), GUGgucagua (SEQ ID NO: 4315), CUGgugagcc (SEQ ID NO: 4316), CAGgugcuua (SEQ ID NO: 1390), AUAgucguga (SEQ ID NO: 4317), AUAgugagug (SEQ ID NO: 862), GAGgucaaaa (SEQ ID NO: 4318), CGUguagcuu (SEQ ID NO: 4319), CAGguguuug (SEQ ID NO: 4320), CAGguuggac (SEQ ID NO: 4321), CAGguaagcu (SEQ ID NO: 4322), AGGgucagaa (SEQ ID NO: 4323), CACguauguc (SEQ ID NO: 4324), CACgugagug (SEQ ID NO: 1098), GGGguacgga (SEQ ID NO: 4325), AAGgcaggac (SEQ ID NO: 4326), GAGgugaagc (SEQ ID NO: 4327), GAGguuugaa (SEQ ID NO: 4328), CAGguaagug (SEQ ID NO: 1148), CAGguaacca (SEQ ID NO: 1131), CAGguacucc (SEQ ID NO: 1189), AAGgugcuuu (SEQ ID NO: 371), GAGguaaaua (SEQ ID NO: 1873), GAGgcaggug (SEQ ID NO: 4329), GAGguucgga (SEQ ID NO: 4330), CAGguauuug (SEQ ID NO: 1270), CAGguaaaua (SEQ ID NO: 1125), CAGgugaugu (SEQ ID NO: 1354), CAGgugauac (SEQ ID NO: 4331), GAGgugaggc (SEQ ID NO: 2023), AGGguggggg (SEQ ID NO: 4332), UAAguaaguu (SEQ ID NO: 2425), UGGgugaaca (SEQ ID NO: 4333), UAGguacugc (SEQ ID NO: 4334), CAGgcuccug (SEQ ID NO: 4335), AGGguaggca (SEQ ID NO: 753), CAGgugcccg (SEQ ID NO: 1371), GAGguacauc (SEQ ID NO: 4336), AGGgugugug (SEQ ID NO: 804), AAGguaguaa (SEQ ID NO: 231), UGGguaugag (SEQ ID NO: 2859), GGGgugugug (SEQ ID NO: 2294), CUAguaggug (SEQ ID NO: 4337), GAGgcaagga (SEQ ID NO: 4338), AAGgcaagac (SEQ ID NO: 4339), AAAgugcggu (SEQ ID NO: 4340), AAGguugguu (SEQ ID NO: 450), GAGguuaaug (SEQ ID NO: 4341), UUGgugaguc (SEQ ID NO: 3005), UCGguuagcu (SEQ ID NO: 2738), GCAguaagca (SEQ ID NO: 4342), AAGgcaagca (SEQ ID NO: 4343), ACAguaagcu (SEQ ID NO: 4344), GAGguaacag (SEQ ID NO: 1878), AAAguacgua (SEQ ID NO: 4345), GAGguaauac (SEQ ID NO: 1896), UUGguaggug (SEQ ID NO: 2980), CUGguuaguc (SEQ ID NO: 4346), GAGgugacgc (SEQ ID NO: 4347), ACAguaagga (SEQ ID NO: 4348), AAUguacuua (SEQ ID NO: 4349), GGGguacagu (SEQ ID NO: 4350), CGUguaugug (SEQ ID NO: 4351), UCCguagguu (SEQ ID NO: 4352), GAGguggucg (SEQ ID NO: 4353), UCAgugaguc (SEQ ID NO: 4354), AAAguaagca (SEQ ID NO: 15), GAGgucuggu (SEQ ID NO: 1999), GAGguaauua (SEQ ID NO: 4355), GUAguaagua (SEQ ID NO: 2323), AAGgugggga (SEQ ID NO: 382), UCUgugagca (SEQ ID NO: 4356), GAAguucgug (SEQ ID NO: 4357), ACGgugaggc (SEQ ID NO: 4358), UCAgugagua (SEQ ID NO: 2699), UAGguaguug (SEQ ID NO: 4359), GGUgucuggg (SEQ ID NO: 4360), GGGguaagug (SEQ ID NO: 2252), GAGguggguu (SEQ ID NO: 2066), UGUgugaguu (SEQ ID NO: 4361), CAUguaagua (SEQ ID NO: 1522), AAGguaggug (SEQ ID NO: 229), AAUguaggag (SEQ ID NO: 4362), GAGgcacguc (SEQ ID NO: 4363), CAAguacauu (SEQ ID NO: 4364), UUGguacaga (SEQ ID NO: 4365), GAGguaguag (SEQ ID NO: 1941), AAAgugaggg (SEQ ID NO: 57), UUGgucagug (SEQ ID NO: 4366), AGGgugaguc (SEQ ID NO: 796), CAGgugaaca (SEQ ID NO: 1317), GGUgugggcc (SEQ ID NO: 4367), CGGgugagcu (SEQ ID NO: 4368), GGGgugaguc (SEQ ID NO: 2283), ACAgugagag (SEQ ID NO: 4369), AGGgugaggu (SEQ ID NO: 794), GCUguaaguc (SEQ ID NO: 2194), AUAguagguu (SEQ ID NO: 4370), CAGgcaugug (SEQ ID NO: 1114), AAGguaaguu (SEQ ID NO: 156), CAGguccgug (SEQ ID NO: 4371), GAGgcaggua (SEQ ID NO: 4372), AUGguggaag (SEQ ID NO: 4373), AUGgugggcg (SEQ ID NO: 4374), GAGgugagaa (SEQ ID NO: 2014), AGUgugagca (SEQ ID NO: 832), UUGguaagua (SEQ ID NO: 2962), CAAguaagca (SEQ ID NO: 4375), GGUgugagcu (SEQ ID NO: 2313), CCCgugggua (SEQ ID NO: 4376), CAGguagaau (SEQ ID NO: 4377), CAGgcugagc (SEQ ID NO: 4378), CUGguggece (SEQ ID NO: 4379), UGAguaagag (SEQ ID NO: 4380), CACguuagcu (SEQ ID NO: 4381), AAGgugaguc (SEQ ID NO: 348), AAGguagcuc (SEQ ID NO: 4382), UCGgugaguu (SEQ ID NO: 4383), GAGgcccuuc (SEQ ID NO: 4384), CAGguuaugc (SEQ ID NO: 4385), CCUguaagcu (SEQ ID NO: 4386), CAGgucuccu (SEQ ID NO: 4387), UAGguaggcu (SEQ ID NO: 4388), GGGguagggg (SEQ ID NO: 4389), AAGguaguga (SEQ ID NO: 4390), GAGguuguug (SEQ ID NO: 4391), CAGguugguu (SEQ ID NO: 1489), AAAguaagcc (SEQ ID NO: 16), ACAgugagug (SEQ ID NO: 562), UGGgugugau (SEQ ID NO: 4392), CCCguaacua (SEQ ID NO: 4393), AAGguguugc (SEQ ID NO: 408), AAAgcuggug (SEQ ID NO: 4394), GAGguauagu (SEQ ID NO: 4395), ACGguaagag (SEQ ID NO: 4396), AUGguacggu (SEQ ID NO: 913), GAGgccaguu (SEQ ID NO: 4397), GAGguaugcg (SEQ ID NO: 1960), UCGgugggag (SEQ ID NO: 4398), AAGguggaua (SEQ ID NO: 372), CCAguguggc (SEQ ID NO: 4399), AGGguaagug (SEQ ID NO: 742), UCUguagguc (SEQ ID NO: 4400), CAGgcaagga (SEQ ID NO: 1102), CGGguaauuu (SEQ ID NO: 1628), AUUgugaguc (SEQ ID NO: 1010), CAGguaaacc (SEQ ID NO: 1121), AAGgucaauu (SEQ ID NO: 4401), AAGgugaaua (SEQ ID NO: 327), GUCguaagaa (SEQ ID NO: 4402), GCGguaaguc (SEQ ID NO: 4403), CUGguagagc (SEQ ID NO: 4404), GAGgucgguc (SEQ ID NO: 4405), CAGguaaaca (SEQ ID NO: 1120), AAGgcaagga (SEQ ID NO: 98), CAGgucgucu (SEQ ID NO: 4406), GGGguagggc (SEQ ID NO: 4407), CUGguacuaa (SEQ ID NO: 1721), GAGguagcug (SEQ ID NO: 1929), CUUgucagcu (SEQ ID NO: 4408), UAGguaaggc (SEQ ID NO: 2489), CUGguauuac (SEQ ID NO: 4409), UAAguacguc (SEQ ID NO: 4410), AAGguaagcc (SEQ ID NO: 146), ACGgugaaag (SEQ ID NO: 4411), CCAgccaaua (SEQ ID NO: 4412), CAGguuuguc (SEQ ID NO: 4413), AAGguauaau (SEQ ID NO: 239), AAGgucuuag (SEQ ID NO: 4414), AGGgugagcu (SEQ ID NO: 791), AAGguuaggg (SEQ ID NO: 4415), CGGguaaauu (SEQ ID NO: 4416), CAGguaacgg (SEQ ID NO: 4417), AGAgugugua (SEQ ID NO: 4418), ACAguaaguu (SEQ ID NO: 549), GAUguaauuu (SEQ ID NO: 4419), GAGguaggga (SEQ ID NO: 1934), UUGgcaagug (SEQ ID NO: 2945), AAAgugagga (SEQ ID NO: 4420), AAGguagugc (SEQ ID NO: 234), AGAguaauuc (SEQ ID NO: 674), GGAguaaaua (SEQ ID NO: 4421), GUGguaccca (SEQ ID NO: 4422), CAGguauugc (SEQ ID NO: 4423), GAUgugaggg (SEQ ID NO: 4424), CAAguaaauc (SEQ ID NO: 1017), CAGgugucuc (SEQ ID NO: 1428), AAGguaacag (SEQ ID NO: 4425), UUGguaaaag (SEQ ID NO: 4426), CAGguaucau (SEQ ID NO: 1240), ACGgugagac (SEQ ID NO: 4427), CUGguaugac (SEQ ID NO: 4428), CAGguucacu (SEQ ID NO: 4429), GAGgugauca (SEQ ID NO: 4430), AGUguaaguc (SEQ ID NO: 4431), AACguaagua (SEQ ID NO: 4432), AAAgugagug (SEQ ID NO: 60), GAGguacagg (SEQ ID NO: 4433), CAAguaauga (SEQ ID NO: 4434), GAUguaagga (SEQ ID NO: 4435), UCAguucccc (SEQ ID NO: 4436), GCGguaagga (SEQ ID NO: 4437), UAGguacuaa (SEQ ID NO: 4438), AAGgugaaag (SEQ ID NO: 321), ACUguaagug (SEQ ID NO: 4439), UGGguaugug (SEQ ID NO: 2862), AUGguaacag (SEQ ID NO: 884), CAGguagggu (SEQ ID NO: 1219), ACAguaagug (SEQ ID NO: 548), AAGgugcucc (SEQ ID NO: 366), AAGgugugcu (SEQ ID NO: 4440), AAGgugguga (SEQ ID NO: 4441), ACGgugcgcc (SEQ ID NO: 4442), AAGguauugc (SEQ ID NO: 4443), GGGguaugug (SEQ ID NO: 2267), CAGgugggcu (SEQ ID NO: 1408), GAGguauguu (SEQ ID NO: 1968), AACgugaaua (SEQ ID NO: 4444), CAGguaaugg (SEQ ID NO: 1154), UAGguaugau (SEQ ID NO: 4445), CAGgcaggug (SEQ ID NO: 1108), GGGguugguc (SEQ ID NO: 4446), AAGguauggg (SEQ ID NO: 262), UAAgugaggc (SEQ ID NO: 4447), CAAgugaucg (SEQ ID NO: 4448), AAAguacggg (SEQ ID NO: 4449), AGAgcuacag (SEQ ID NO: 4450), GAGgugggaa (SEQ ID NO: 2054), CAGguacuuu (SEQ ID NO: 1195), GAGgugagag (SEQ ID NO: 2016), CAGguagguc (SEQ ID NO: 1221), UGGguacagc (SEQ ID NO: 4451), AAGgugucag (SEQ ID NO: 396), AAGgcaagaa (SEQ ID NO: 4452), GAGguaaaca (SEQ ID NO: 4453), AAGguaaagu (SEQ ID NO: 129), AAGguaguca (SEQ ID NO: 4454), CUGguauguc (SEQ ID NO: 4455), GAGguauggg (SEQ ID NO: 1963), AAGguauugu (SEQ ID NO: 273), CUGguacuga (SEQ ID NO: 4456), GAGguaagcu (SEQ ID NO: 1888), UGGgugggua (SEQ ID NO: 2883), CAGguucgug (SEQ ID NO: 4457), AAGguauggu (SEQ ID NO: 4458), CAGgugagca (SEQ ID NO: 1337), UGGguaaauu (SEQ ID NO: 2827), UGUguaggug (SEQ ID NO: 4459), UGUgugagcc (SEQ ID NO: 2921), CUGguaauau (SEQ ID NO: 4460), AAAguauguu (SEQ ID NO: 45), UGUguaagaa (SEQ ID NO: 2903), CUAgugagaa (SEQ ID NO: 4461), AGGguagguc (SEQ ID NO: 757), AAGgugggug (SEQ ID NO: 385), UCGguaagug (SEQ ID NO: 4462), AGUguaaaua (SEQ ID NO: 812), GAUguaagug (SEQ ID NO: 2122), AAGguuagug (SEQ ID NO: 424), UAGguaagca (SEQ ID NO: 2485), CAAgugagaa (SEQ ID NO: 1061), AGUguaagua (SEQ ID NO: 819), CAGgugaauc (SEQ ID NO: 1321), UGGgugagac (SEQ ID NO: 2868), AAGguagggc (SEQ ID NO: 224), CUGguuugug (SEQ ID NO: 1788), GCGguagggc (SEQ ID NO: 4463), GAGguaaucc (SEQ ID NO: 4464), AUUguaauaa (SEQ ID NO: 4465), CUGgugaaua (SEQ ID NO: 1748), AAGguuuaaa (SEQ ID NO: 4466), CCUguacugu (SEQ ID NO: 4467), GCGgugagcg (SEQ ID NO: 4468), AAGguaaucc (SEQ ID NO: 162), UAUgugagua (SEQ ID NO: 2671), CCCgugagug (SEQ ID NO: 1573), CAGgugcaga (SEQ ID NO: 1363), CAGgucaguu (SEQ ID NO: 1284), CAGguaggcu (SEQ ID NO: 4469), AAAguaagug (SEQ ID NO: 23), UAGguugguc (SEQ ID NO: 4470), CAGguugccu (SEQ ID NO: 4471), AAGguaugga (SEQ ID NO: 260), GGUguggacg (SEQ ID NO: 4472), AAAgugagaa (SEQ ID NO: 51), AGGgugagag (SEQ ID NO: 788), GAUguggcau (SEQ ID NO: 4473), UCGguaaggu (SEQ ID NO: 4474), GAGgugcguc (SEQ ID NO: 4475), CGGgugaguc (SEQ ID NO: 4476), AAGguacggg (SEQ ID NO: 190), GAGguucuug (SEQ ID NO: 4477), AAGgugcuug (SEQ ID NO: 4478), UAGguaugua (SEQ ID NO: 2551), AUGgucagca (SEQ ID NO: 4479), CGGguacuca (SEQ ID NO: 4480), AGGgugagga (SEQ ID NO: 792), AUCgugagua (SEQ ID NO: 869), UCAguaagua (SEQ ID NO: 2689), UAGguaaaua (SEQ ID NO: 2469), AAGguaauug (SEQ ID NO: 170), GAAgucagug (SEQ ID NO: 1835), CAGguacaaa (SEQ ID NO: 1160), AAAguuaauc (SEQ ID NO: 4481), AGCgugagcg (SEQ ID NO: 4482), CCGgcuggug (SEQ ID NO: 4483), AGUguaauuu (SEQ ID NO: 4484), UGAgccacuc (SEQ ID NO: 4485), GGGgucugua (SEQ ID NO: 4486), AUGgcauguc (SEQ ID NO: 4487), CGGguaaaga (SEQ ID NO: 4488), AGGguagcau (SEQ ID NO: 4489), CGGguaggag (SEQ ID NO: 1631), GAGguucgug (SEQ ID NO: 4490), UAAguuauuc (SEQ ID NO: 4491), UAUguaagau (SEQ ID NO: 2650), AAGguaguuu (SEQ ID NO: 237), CAGgugguau (SEQ ID NO: 4492), GUGguaauga (SEQ ID NO: 2355), AAGgugauuu (SEQ ID NO: 359), CAGgugaagu (SEQ ID NO: 4493), GUAguaauua (SEQ ID NO: 4494), AUGguuggug (SEQ ID NO: 4495), CCAguaagug (SEQ ID NO: 1557), UAGgugagag (SEQ ID NO: 2589), AUGgugaggc (SEQ ID NO: 959), AAAguuagug (SEQ ID NO: 72), AAGgugccuu (SEQ ID NO: 4496), UAGguaugag (SEQ ID NO: 2546), CAGgugugac (SEQ ID NO: 1431), CUGguggguu (SEQ ID NO: 1774), AUGguaagga (SEQ ID NO: 896), UCUguaagaa (SEQ ID NO: 2740), UCCgugaguu (SEQ ID NO: 4497), AAAgcaggua (SEQ ID NO: 4498), UAUgugagug (SEQ ID NO: 2672), CAGguggagg (SEQ ID NO: 4499), CAGguuagac (SEQ ID NO: 4500), AUAguaagac (SEQ ID NO: 846), AAGguguugu (SEQ ID NO: 4501), GAGgucugug (SEQ ID NO: 4502), AAGguaagau (SEQ ID NO: 144), CAUguaaguu (SEQ ID NO: 1524), CUGguaauua (SEQ ID NO: 4503), CAGguaggcg (SEQ ID NO: 4504), AGAguaaguc (SEQ ID NO: 669), UGGgugagga (SEQ ID NO: 2872), AAUguaggua (SEQ ID NO: 4505), UAGguuagca (SEQ ID NO: 4506), GGGguaggua (SEQ ID NO: 2258), GAGguauugc (SEQ ID NO: 4507), AUUguacaca (SEQ ID NO: 4508), GAAguaggua (SEQ ID NO: 4509), GGAguaagcu (SEQ ID NO: 2212), UAGguaugug (SEQ ID NO: 2553), GAGgugaaua (SEQ ID NO: 2007), GAGgugggau (SEQ ID NO: 2056), AAGguaaucu (SEQ ID NO: 163), GGUgugaguu (SEQ ID NO: 4510), AACgugaguu (SEQ ID NO: 4511), GAGguaaccg (SEQ ID NO: 4512), UAGguaagga (SEQ ID NO: 2488), AUUguaagaa (SEQ ID NO: 4513), UGGgugagca (SEQ ID NO: 2870), AAGguaaggc (SEQ ID NO: 150), CCAguaucgu (SEQ ID NO: 4514), CCGgugggug (SEQ ID NO: 4515), GAGguagugu (SEQ ID NO: 4516), ACGgugggaa (SEQ ID NO: 4517), GAGgugaccu (SEQ ID NO: 2011), CACguaugua (SEQ ID NO: 4518), AGGgugggga (SEQ ID NO: 799), AAUguaaguc (SEQ ID NO: 490), AAAguuaagu (SEQ ID NO: 70), CAUgugagug (SEQ ID NO: 1541), AGAguauguc (SEQ ID NO: 694), GCGguaugac (SEQ ID NO: 4519), CGGgugaguu (SEQ ID NO: 1643), CCGguauuuu (SEQ ID NO: 4520), GAGguagaac (SEQ ID NO: 4521), UAGguaugaa (SEQ ID NO: 2545), CAGgcgcgug (SEQ ID NO: 4522), CAAguaaguc (SEQ ID NO: 1027), AGUguaagau (SEQ ID NO: 816), AAGguucuac (SEQ ID NO: 4523), CCAguaagua (SEQ ID NO: 1555), GAGguagcag (SEQ ID NO: 4524), CAGgucuguu (SEQ ID NO: 1312), CAGguacaau (SEQ ID NO: 1162), CCGguaaaga (SEQ ID NO: 1574), UAAgugcugu (SEQ ID NO: 4525), AGGgugagaa (SEQ ID NO: 786), CUCguaaggu (SEQ ID NO: 4526), CAGgucagcu (SEQ ID NO: 4527), CAGguaaggc (SEQ ID NO: 1144), AGGgugcagg (SEQ ID NO: 4528), GAGgugaaac (SEQ ID NO: 4529), AGGguaagua (SEQ ID NO: 740), AAUguaugcc (SEQ ID NO: 4530), AAGguaagca (SEQ ID NO: 145), ACGguacggu (SEQ ID NO: 587), AAGguaauga (SEQ ID NO: 164), UCUgcucaau (SEQ ID NO: 4531), ACGguaaugu (SEQ ID NO: 4532), AAGguaguug (SEQ ID NO: 4533), ACGguaagug (SEQ ID NO: 580), CAGgugauga (SEQ ID NO: 4534), GAGguaacac (SEQ ID NO: 4535), GAGguaggua (SEQ ID NO: 1937), CAGguaccuu (SEQ ID NO: 1179), CAGguaauaa (SEQ ID NO: 1150), UUGgugggug (SEQ ID NO: 3016), CUGguaauga (SEQ ID NO: 1710), UAGguaaguc (SEQ ID NO: 2492), AGGgugugac (SEQ ID NO: 4536), GAGgcaauaa (SEQ ID NO: 4537), GUGguaaagc (SEQ ID NO: 4538), CUGgugggcg (SEQ ID NO: 4539), GAUguauguu (SEQ ID NO: 2128), AGGgugagac (SEQ ID NO: 787), UCGgucagca (SEQ ID NO: 4540), AUGgugauua (SEQ ID NO: 4541), CGAgugugua (SEQ ID NO: 4542), CAGguuggug (SEQ ID NO: 1488), AGCgcaagua (SEQ ID NO: 4543), UGGguacguu (SEQ ID NO: 4544), GAGguauuug (SEQ ID NO: 1974), AGUguacaua (SEQ ID NO: 4545), AUGguaagua (SEQ ID NO: 898), ACAguagguu (SEQ ID NO: 4546), AAGgugagag (SEQ ID NO: 337), UUGgugaagu (SEQ ID NO: 4547), AAAguaugua (SEQ ID NO: 43), UGGguaagga (SEQ ID NO: 4548), UAGgugccuu (SEQ ID NO: 4549), and CCUgugggug (SEQ ID NO: 4550).

[0161] Additional exemplary gene sequences and splice site sequences (e.g., 5′ splice site sequences) include UCCguaaguu (SEQ ID NO: 4551), GUGguaaacg (SEQ ID NO: 4552), CGGgugcggu (SEQ ID NO: 4553), CAUguacuuc (SEQ ID NO: 4554), AGAguaaagg (SEQ ID NO: 4555), CGCgugagua (SEQ ID NO: 4556), AGAgugggca (SEQ ID NO: 4557), AGAguaagcc (SEQ ID NO: 4558), AGAguaaaca (SEQ ID NO: 4559), GUGguuauga (SEQ ID NO: 4560), AGGguaauaa (SEQ ID NO: 4561), UGAguaagac (SEQ ID NO: 4562), AGAguuuguu (SEQ ID NO: 4563), CGGgucugca (SEQ ID NO: 4564), CAGguaaguc (SEQ ID NO: 4565), AAGguagaau (SEQ ID NO: 4566), CAGgucccuc (SEQ ID NO: 4567), AGAguaaugg (SEQ ID NO: 4568), GAGgucuaag (SEQ ID NO: 4569), AGAguagagu (SEQ ID NO: 4570), AUGgucagua (SEQ ID NO: 4571), GAGgccuggg (SEQ ID NO: 4572), AAGguguggc (SEQ ID NO: 4573), AGAgugaucu (SEQ ID NO: 4574), AAGguaucca (SEQ ID NO: 4575), UUCguaagua (SEQ ID NO: 4576), UAAgugggug (SEQ ID NO: 4577), GCCgugaacg (SEQ ID NO: 4578), GAGguugugg (SEQ ID NO: 4579), UAUguaugca (SEQ ID NO: 4580), UGUguaacaa (SEQ ID NO: 4581), AGGguauuag (SEQ ID NO: 4582), UGAguauauc (SEQ ID NO: 4583), AGAguuugug (SEQ ID NO: 4584), GAGgucgcug (SEQ ID NO: 4585), GAGgucaucg (SEQ ID NO: 4586), ACGguaaagc (SEQ ID NO: 4587), UGAguacuug (SEQ ID NO: 4588), CGAgucgccg (SEQ ID NO: 4589), CUGguacguc (SEQ ID NO: 4590), AGGguauugc (SEQ ID NO: 4591), GAAgugaaug (SEQ ID NO: 4592), CAGaugaguc (SEQ ID NO: 4593), UGGguauugg (SEQ ID NO: 4594), UGAguaaaga (SEQ ID NO: 4595), GUGguuccug (SEQ ID NO: 4596), UGAgcaagua (SEQ ID NO: 4597), UAUguaagag (SEQ ID NO: 4598), AAGgucuugc (SEQ ID NO: 4599), AAAgcaugug (SEQ ID NO: 4600), AGAguacagu (SEQ ID NO: 4601), GUGguaaucc (SEQ ID NO: 4602), CAGguagagg (SEQ ID NO: 4603), AAGguacaac (SEQ ID NO: 4604), UGGgcagcau (SEQ ID NO: 4605), CCGgucauca (SEQ ID NO: 4606), CCGguuugua (SEQ ID NO: 4607), UGAguaaggg (SEQ ID NO: 4608), GAAguaugua (SEQ ID NO: 4609), GGGguagcuc (SEQ ID NO: 4610), GCUguacaua (SEQ ID NO: 4611), CUGgucucuu (SEQ ID NO: 4612), GUGguaaaug (SEQ ID NO: 4613), AUCguaagug (SEQ ID NO: 4614), GAGgcaugua (SEQ ID NO: 4615), AAGgucuccc (SEQ ID NO: 4616), UGGgugcguu (SEQ ID NO: 4617), UGUguagguu (SEQ ID NO: 4618), GAAgugagca (SEQ ID NO: 4619), GGUguaauuu (SEQ ID NO: 4620), CUGgugaaau (SEQ ID NO: 4621), AUCguaaguc (SEQ ID NO: 4622), AGAguaaucc (SEQ ID NO: 4623), GGAguagguc (SEQ ID NO: 4624), GAGguaccaa (SEQ ID NO: 4625), CUUguaggug (SEQ ID NO: 4626), AAGguauaag (SEQ ID NO: 4627), AGAguuggua (SEQ ID NO: 4628), AUGguuugug (SEQ ID NO: 4629), UGGgucagau (SEQ ID NO: 4630), AGAguaggac (SEQ ID NO: 4631), AGAguagugu (SEQ ID NO: 4632), AGAguaggag (SEQ ID NO: 4633), CAGgucucua (SEQ ID NO: 4634), AAGguggaug (SEQ ID NO: 4635), UGGguaucaa (SEQ ID NO: 4636), GAUguaugga (SEQ ID NO: 4637), AAGguguuuc (SEQ ID NO: 4638), GCAguguaaa (SEQ ID NO: 4639), UUAguaugua (SEQ ID NO: 4640), UCUguaugca (SEQ ID NO: 4641), AAUguaaaau (SEQ ID NO: 4642), AGAguaaauu (SEQ ID NO: 4643), GGGguacuuu (SEQ ID NO: 4644), GAAguuugau (SEQ ID NO: 4645), AAAguagauu (SEQ ID NO: 4646), UGUguagagu (SEQ ID NO: 4647), UGGguaagcg (SEQ ID NO: 4648), CGGguucagg (SEQ ID NO: 4649), AGGguacgac (SEQ ID NO: 4650), UCGguaagaa (SEQ ID NO: 4651), AGGguuggca (SEQ ID NO: 4652), AAAguacagu (SEQ ID NO: 4653), UAAguuaagg (SEQ ID NO: 4654), AUGguaaugu (SEQ ID NO: 4655), GUGguuuuac (SEQ ID NO: 4656), AGAguaacaa (SEQ ID NO: 4657), AAGguagccc (SEQ ID NO: 4658), GCGgugaggc (SEQ ID NO: 4659), AUGguucagc (SEQ ID NO: 4660), AAGguacuua (SEQ ID NO: 4661), AAGguccgug (SEQ ID NO: 4662), UAGguaagcg (SEQ ID NO: 4663), AUGguaccuu (SEQ ID NO: 4664), GCCguggugg (SEQ ID NO: 4665), CUGgugeguc (SEQ ID NO: 4666), CAGguggaaa (SEQ ID NO: 4667), AAAgucugua (SEQ ID NO: 4668), GAGguaaccc (SEQ ID NO: 4669), AGAguauggg (SEQ ID NO: 4670), UAUgccccug (SEQ ID NO: 4671), AAGgugccag (SEQ ID NO: 4672), ACGgugcggc (SEQ ID NO: 4673), AGGguacuga (SEQ ID NO: 4674), AGAguaagcg (SEQ ID NO: 4675), CUGgcaaggg (SEQ ID NO: 4676), CCAgugugug (SEQ ID NO: 4677), GAGguagacg (SEQ ID NO: 4678), CGGgugcggg (SEQ ID NO: 4679), GAUguaagcu (SEQ ID NO: 4680), AUUguauuua (SEQ ID NO: 4681), UGCgugagug (SEQ ID NO: 4682), CUGgucuaua (SEQ ID NO: 4683), GAGgugcuag (SEQ ID NO: 4684), GAGgugccau (SEQ ID NO: 4685), CAGguacguc (SEQ ID NO: 4686), GAGguucagc (SEQ ID NO: 4687), AACguaagaa (SEQ ID NO: 4688), AGAguaguac (SEQ ID NO: 4689), AAGguaacgg (SEQ ID NO: 4690), UAGgugugac (SEQ ID NO: 4691), CCGguaauag (SEQ ID NO: 4692), CAGguaccag (SEQ ID NO: 4693), UUUguaauug (SEQ ID NO: 4694), AAUguacgaa (SEQ ID NO: 4695), CAGguaauga (SEQ ID NO: 4696), AUCgucaagg (SEQ ID NO: 4697), CUGguagaug (SEQ ID NO: 4698), GGGgugcagu (SEQ ID NO: 4699), AGUgugagaa (SEQ ID NO: 4700), GGGguuuuau (SEQ ID NO: 4701), CCUguccccu (SEQ ID NO: 4702), AUUgugaagu (SEQ ID NO: 4703), AAGguaaacg (SEQ ID NO: 4704), UACgucgugg (SEQ ID NO: 4705), AAGgugccau (SEQ ID NO: 4706), GGGgucccag (SEQ ID NO: 4707), UAUguauggu (SEQ ID NO: 4708), CGGguaauua (SEQ ID NO: 4709), CGGguacucc (SEQ ID NO: 4710), CAGgugacuu (SEQ ID NO: 4711), AGUguggguu (SEQ ID NO: 4712), AGAguauggc (SEQ ID NO: 4713), AAGgccaaca (SEQ ID NO: 4714), AAAgcaagua (SEQ ID NO: 4715), UCAguagguc (SEQ ID NO: 4716), GUGguggcgg (SEQ ID NO: 4717), CAUguauccu (SEQ ID NO: 4718), UCGgugagcc (SEQ ID NO: 4719), AUAguugggu (SEQ ID NO: 4720), AAUguuagcu (SEQ ID NO: 4721), AUGgugaaug (SEQ ID NO: 4722), CGGguaaugu (SEQ ID NO: 4723), UCUguaggug (SEQ ID NO: 4724), CCGgugaggc (SEQ ID NO: 4725), UGAguccacu (SEQ ID NO: 4726), CUAguaagag (SEQ ID NO: 4727), CGGguggggc (SEQ ID NO: 4728), CGAguaagca (SEQ ID NO: 4729), UGUgccaauu (SEQ ID NO: 4730), UCGguaagcc (SEQ ID NO: 4731), UAUguaggug (SEQ ID NO: 4732), UUGgugggcc (SEQ ID NO: 4733), GAGgcugggc (SEQ ID NO: 4734), AGAguaacuu (SEQ ID NO: 4735), ACGguagguc (SEQ ID NO: 4736), CAGgcccaga (SEQ ID NO: 4737), CCGguggguu (SEQ ID NO: 4738), AAGgugacgg (SEQ ID NO: 4739), GGGguacagc (SEQ ID NO: 4740), CAUguaaguc (SEQ ID NO: 4741), AUUgugagaa (SEQ ID NO: 4742), UGUguaagga (SEQ ID NO: 4743), UUUguaagau (SEQ ID NO: 4744), AGGgucauuu (SEQ ID NO: 4745), UGGguuuguu (SEQ ID NO: 4746), CGAguaagcc (SEQ ID NO: 4747), GUGgugugua (SEQ ID NO: 4748), AUGguauaac (SEQ ID NO: 4749), UGGguacgua (SEQ ID NO: 4750), AAAguagagu (SEQ ID NO: 4751), UCGguaacug (SEQ ID NO: 4752), AGAguaauga (SEQ ID NO: 4753), AUGguggguc (SEQ ID NO: 4754), AGAguaauau (SEQ ID NO: 4755), CAGguacugg (SEQ ID NO: 4756), UAAgucaguu (SEQ ID NO: 4757), GCGguagaga (SEQ ID NO: 4758), AAGgugaugg (SEQ ID NO: 4759), ACAguauguu (SEQ ID NO: 4760), GAUguacguc (SEQ ID NO: 4761), UAGguuucuc (SEQ ID NO: 4762), GAGgcauggg (SEQ ID NO: 4763), AUAgcuaagu (SEQ ID NO: 4764), GUAgucugua (SEQ ID NO: 4765), AAGgugaacg (SEQ ID NO: 4766), GUGguggucg (SEQ ID NO: 4767), GAGguugauc (SEQ ID NO: 4768), UGAguggguu (SEQ ID NO: 4769), ACUguacgug (SEQ ID NO: 4770), CUGgugacug (SEQ ID NO: 4771), CAAguuaagc (SEQ ID NO: 4772), GAGguaccca (SEQ ID NO: 4773), AACguaacuu (SEQ ID NO: 4774), CAGguuacua (SEQ ID NO: 4775), AGAguuaguc (SEQ ID NO: 4776), UGGgcacguc (SEQ ID NO: 4777), AGUguauggu (SEQ ID NO: 4778), AAGguugcaa (SEQ ID NO: 4779), CAGguuguua (SEQ ID NO: 4780), AAGgcauccc (SEQ ID NO: 4781), GAUguaaggc (SEQ ID NO: 4782), AGGguacggg (SEQ ID NO: 4783), GAGgucaaag (SEQ ID NO: 4784), CAAgugagcg (SEQ ID NO: 4785), AGAguaaucu (SEQ ID NO: 4786), UCGguagcug (SEQ ID NO: 4787), AAAguaguag (SEQ ID NO: 4788), CAGguucguc (SEQ ID NO: 4789), CGUguaugaa (SEQ ID NO: 4790), AGUguaaaaa (SEQ ID NO: 4791), AAGgucucac (SEQ ID NO: 4792), UAGguggagc (SEQ ID NO: 4793), UGAguaggug (SEQ ID NO: 4794), AGAguaugcc (SEQ ID NO: 4795), GAGguugcau (SEQ ID NO: 4796), CAAguaagag (SEQ ID NO: 4797), UCUgugugcc (SEQ ID NO: 4798), GAGgugaugc (SEQ ID NO: 4799), GGGgugauaa (SEQ ID NO: 4800), CCCgugagcc (SEQ ID NO: 4801), AGAguaacug (SEQ ID NO: 4802), GCGguaagua (SEQ ID NO: 4803), AGAguacauc (SEQ ID NO: 4804), UCGgucuggg (SEQ ID NO: 4805), UAAguaucuc (SEQ ID NO: 4806), GGCguagguu (SEQ ID NO: 4807), AGAguacgcc (SEQ ID NO: 4808), GAUgucuucu (SEQ ID NO: 4809), AGGgcaaggu (SEQ ID NO: 4810), CGAguaugau (SEQ ID NO: 4811), AUGguagagu (SEQ ID NO: 4812), CAAguacgag (SEQ ID NO: 4813), UCGguaugau (SEQ ID NO: 4814), CCGguguguu (SEQ ID NO: 4815), AGGgucugug (SEQ ID NO: 4816), GGAguaggcu (SEQ ID NO: 4817), AAGgucuaug (SEQ ID NO: 4818), GCAgugcgug (SEQ ID NO: 4819), UGGgugagaa (SEQ ID NO: 4820), AGGguaaagu (SEQ ID NO: 4821), GAGguaggac (SEQ ID NO: 4822), CUAguaagca (SEQ ID NO: 4823), UUAguaggcu (SEQ ID NO: 4824), CUGgugggau (SEQ ID NO: 4825), CUGguuagua (SEQ ID NO: 4826), AAGguacgug (SEQ ID NO: 4827), CGGgugagau (SEQ ID NO: 4828), AAGgugcaug (SEQ ID NO: 4829), AAUgugggcu (SEQ ID NO: 4830), CAGguugacu (SEQ ID NO: 4831), CAGguuacag (SEQ ID NO: 4832), GCGguaacau (SEQ ID NO: 4833), AUUgucaguc (SEQ ID NO: 4834), CAAguauaca (SEQ ID NO: 4835), GAUguccgcc (SEQ ID NO: 4836), AAGgugcgga (SEQ ID NO: 4837), AACguaagag (SEQ ID NO: 4838), UGGguuggua (SEQ ID NO: 4839), CAAguguaag (SEQ ID NO: 4840), GUGguaacgu (SEQ ID NO: 4841), CUGgugauca (SEQ ID NO: 4842), AGGguggggc (SEQ ID NO: 4843), UCGguaaaga (SEQ ID NO: 4844), CAGguacacc (SEQ ID NO: 4845), CGGguaaggg (SEQ ID NO: 4846), CAAguuugcu (SEQ ID NO: 4847), ACAgugcgug (SEQ ID NO: 4848), UUGguauggg (SEQ ID NO: 4849), GAGgcucauc (SEQ ID NO: 4850), CUGguaauag (SEQ ID NO: 4851), AUGguggaua (SEQ ID NO: 4852), UCAgugaauu (SEQ ID NO: 4853), AAUguaauua (SEQ ID NO: 4854), GCAgucuaaa (SEQ ID NO: 4855), AAGguauucu (SEQ ID NO: 4856), GAGgucauca (SEQ ID NO: 4857), UGGguccaug (SEQ ID NO: 4858), AGAguuugua (SEQ ID NO: 4859), AGGguagacu (SEQ ID NO: 4860), AAGguaggac (SEQ ID NO: 4861), UGUguguuga (SEQ ID NO: 4862), UCAguacgug (SEQ ID NO: 4863), AUGgucucuc (SEQ ID NO: 4864), UGAguuagua (SEQ ID NO: 4865), UGAguaaagu (SEQ ID NO: 4866), GAGgugaccg (SEQ ID NO: 4867), GAGguauauc (SEQ ID NO: 4868), CAGgugccau (SEQ ID NO: 4869), AGAgugguga (SEQ ID NO: 4870), GUUguaagaa (SEQ ID NO: 4871), AGAguaaaua (SEQ ID NO: 4872), AGGgugaagg (SEQ ID NO: 4873), CUGguagauu (SEQ ID NO: 4874), GAGguucagg (SEQ ID NO: 4875), AGGgucuuca (SEQ ID NO: 4876), CUGguaaccu (SEQ ID NO: 4877), ACAguacuga (SEQ ID NO: 4878), AGAguggguc (SEQ ID NO: 4879), AUGguaugag (SEQ ID NO: 4880), AAGguuauau (SEQ ID NO: 4881), AGAguauagu (SEQ ID NO: 4882), AAAguaugaa (SEQ ID NO: 4883), UAGguggcua (SEQ ID NO: 4884), ACCguauggg (SEQ ID NO: 4885), AAAguauaau (SEQ ID NO: 4886), UUUguauggc (SEQ ID NO: 4887), GGGgucgcgu (SEQ ID NO: 4888), GUGgugguuu (SEQ ID NO: 4889), CAGguuugac (SEQ ID NO: 4890), GGAguaggcg (SEQ ID NO: 4891), GAGguacccu (SEQ ID NO: 4892), AUGgugugca (SEQ ID NO: 4893), GUGguuggug (SEQ ID NO: 4894), AAAguaugcu (SEQ ID NO: 4895), UAAguuacau (SEQ ID NO: 4896), ACAguaugag (SEQ ID NO: 4897), GGAguauguu (SEQ ID NO: 4898), UUUgugagaa (SEQ ID NO: 4899), AAUgugcguu (SEQ ID NO: 4900), CAGguagagu (SEQ ID NO: 4901), AUGguguuaa (SEQ ID NO: 4902), CAUgugeguc (SEQ ID NO: 4903), AUAguuggau (SEQ ID NO: 4904), GAGguacgua (SEQ ID NO: 4905), GUUgugagaa (SEQ ID NO: 4906), CAAguacauc (SEQ ID NO: 4907), GAGguaguuu (SEQ ID NO: 4908), ACUguacaga (SEQ ID NO: 4909), CCGguuguga (SEQ ID NO: 4910), UGGgucagug (SEQ ID NO: 4911), GUAguaagaa (SEQ ID NO: 4912), GACguacuuu (SEQ ID NO: 4913), AGAgucaguc (SEQ ID NO: 4914), UAGguuaguu (SEQ ID NO: 4915), AGGgcagcag (SEQ ID NO: 4916), AAGguccuac (SEQ ID NO: 4917), AAUguaauug (SEQ ID NO: 4918), CAGgugcggg (SEQ ID NO: 4919), CUGguaaugg (SEQ ID NO: 4920), CAAguagccc (SEQ ID NO: 4921), GAAgucaguu (SEQ ID NO: 4922), ACAguaauug (SEQ ID NO: 4923), UUAguuagua (SEQ ID NO: 4924), CCUguauuuu (SEQ ID NO: 4925), AUCguaagaa (SEQ ID NO: 4926), CCAgugagca (SEQ ID NO: 4927), GAAguaaggc (SEQ ID NO: 4928), UGAgugggua (SEQ ID NO: 4929), UCAgugguag (SEQ ID NO: 4930), UCUguacagg (SEQ ID NO: 4931), CGAgugagug (SEQ ID NO: 4932), UCCguaugug (SEQ ID NO: 4933), CAUgccguuu (SEQ ID NO: 4934), AAAgugacuu (SEQ ID NO: 4935), AGAguaggca (SEQ ID NO: 4936), GAAguaagag (SEQ ID NO: 4937), CAGgcagguu (SEQ ID NO: 4938), UUGguagagc (SEQ ID NO: 4939), AAGguggaaa (SEQ ID NO: 4940), GAGgcagguc (SEQ ID NO: 4941), AUGguacgac (SEQ ID NO: 4942), AGGguaggaa (SEQ ID NO: 4943), AGGguaggua (SEQ ID NO: 4944), UUGguaaggu (SEQ ID NO: 4945), AUGguacaga (SEQ ID NO: 4946), CAGguagagc (SEQ ID NO: 4947), UAGguaaggu (SEQ ID NO: 4948), GGGguuagag (SEQ ID NO: 4949), AAGguaucaa (SEQ ID NO: 4950), GAGguagccc (SEQ ID NO: 4951), CAGgugccuc (SEQ ID NO: 4952), GCAguaagag (SEQ ID NO: 4953), ACGguagagu (SEQ ID NO: 4954), UGGguaaugg (SEQ ID NO: 4955), CUGgucaguu (SEQ ID NO: 4956), GUGguacauu (SEQ ID NO: 4957), AAAguagguu (SEQ ID NO: 4958), AAGgccaaga (SEQ ID NO: 4959), CGGgugggca (SEQ ID NO: 4960), ACGguccggg (SEQ ID NO: 4961), CGAguaugag (SEQ ID NO: 4962), CUGguaugcc (SEQ ID NO: 4963), GAGguggaug (SEQ ID NO: 4964), CAGgccuuuc (SEQ ID NO: 4965), AAAguacauc (SEQ ID NO: 4966), AAAguaauca (SEQ ID NO: 4967), GAGguaacug (SEQ ID NO: 4968), CUGguaaaga (SEQ ID NO: 4969), CGUguaagca (SEQ ID NO: 4970), UGGgcaagua (SEQ ID NO: 4971), GCGguggcga (SEQ ID NO: 4972), GAGguggccg (SEQ ID NO: 4973), AUUgcaugca (SEQ ID NO: 4974), ACGgugacug (SEQ ID NO: 4975), CAGgucagau (SEQ ID NO: 4976), AGAguaacuc (SEQ ID NO: 4977), UGAguaacag (SEQ ID NO: 4978), AAGguacccg (SEQ ID NO: 4979), AGGguaggcu (SEQ ID NO: 4980), GGGgcaggac (SEQ ID NO: 4981), CCUguaagug (SEQ ID NO: 4982), AUUguaagug (SEQ ID NO: 4983), ACUguacgag (SEQ ID NO: 4984), GUAguagugu (SEQ ID NO: 4985), AGAguaugag (SEQ ID NO: 4986), UCAguguggg (SEQ ID NO: 4987), UGGguauaua (SEQ ID NO: 4988), UAGguagcua (SEQ ID NO: 4989), GGGguaaaga (SEQ ID NO: 4990), AGGguuacuu (SEQ ID NO: 4991), CAUguaaaug (SEQ ID NO: 4992), GGAguaguaa (SEQ ID NO: 4993), CAGgucaauc (SEQ ID NO: 4994), CGGguuagug (SEQ ID NO: 4995), UAGguacaug (SEQ ID NO: 4996), UAGguuaaga (SEQ ID NO: 4997), UGGguaccuu (SEQ ID NO: 4998), CGGguggaca (SEQ ID NO: 4999), CAGgucuuac (SEQ ID NO: 5000), AAGguggagc (SEQ ID NO: 5001), AUGguaacca (SEQ ID NO: 5002), UCGguaaguu (SEQ ID NO: 5003), UAUguacaaa (SEQ ID NO: 5004), AAUguagauu (SEQ ID NO: 5005), GUAgcuagua (SEQ ID NO: 5006), AAGguauugg (SEQ ID NO: 5007), GAGgucuuug (SEQ ID NO: 5008), GAAguucagg (SEQ ID NO: 5009), UGGguaucac (SEQ ID NO: 5010), AGAguacugg (SEQ ID NO: 5011), CAGguuaaug (SEQ ID NO: 5012), AGGguacgug (SEQ ID NO: 5013), AGGgcacagg (SEQ ID NO: 5014), CUGguuaguu (SEQ ID NO: 5015), UUGguacgag (SEQ ID NO: 5016), ACGgugauca (SEQ ID NO: 5017), CCUgugagag (SEQ ID NO: 5018), GAGgugaagu (SEQ ID NO: 5019), AAGguacauc (SEQ ID NO: 5020), UCUguaugug (SEQ ID NO: 5021), UUGguggaag (SEQ ID NO: 5022), UGGgcagguu (SEQ ID NO: 5023), GAAguggagc (SEQ ID NO: 5024), ACAguaagac (SEQ ID NO: 5025), CGGguaccaa (SEQ ID NO: 5026), CAAguacguc (SEQ ID NO: 5027), AGAgugaggg (SEQ ID NO: 5028), CGGguaagaa (SEQ ID NO: 5029), AAUguaggug (SEQ ID NO: 5030), AUCgugugcu (SEQ ID NO: 5031), UAGgucaugg (SEQ ID NO: 5032), CAGguuuuga (SEQ ID NO: 5033), AAGgcaugca (SEQ ID NO: 5034), GAGgugcugc (SEQ ID NO: 5035), AAGguuaaua (SEQ ID NO: 5036), CAGguucauc (SEQ ID NO: 5037), GCGguaggug (SEQ ID NO: 5038), GACgugagua (SEQ ID NO: 5039), CAGgucuacu (SEQ ID NO: 5040), UUGguaugag (SEQ ID NO: 5041), AGCgugggca (SEQ ID NO: 5042), AUGguaaggu (SEQ ID NO: 5043), AUGguaccuc (SEQ ID NO: 5044), UUGguauggu (SEQ ID NO: 5045), UAUguaugaa (SEQ ID NO: 5046), UGGguauggg (SEQ ID NO: 5047), GAUguaaaua (SEQ ID NO: 5048), CCGguaaguu (SEQ ID NO: 5049), GAGgucugaa (SEQ ID NO: 5050), GAGgugcgag (SEQ ID NO: 5051), CUGgucagcc (SEQ ID NO: 5052), CAGguuuugu (SEQ ID NO: 5053), CGGguggugu (SEQ ID NO: 5054), UAAguuagua (SEQ ID NO: 5055), UUUgugugug (SEQ ID NO: 5056), CAGguuaacc (SEQ ID NO: 5057), UUGguacuuu (SEQ ID NO: 5058), GCUguaaggc (SEQ ID NO: 5059), AGGguggcug (SEQ ID NO: 5060), GAUguaaaaa (SEQ ID NO: 5061), AAGgucaaaa (SEQ ID NO: 5062), CAGguagcgc (SEQ ID NO: 5063), CAGguuuggc (SEQ ID NO: 5064), GAGgugguuu (SEQ ID NO: 5065), CGGguaaaua (SEQ ID NO: 5066), CUGguucggu (SEQ ID NO: 5067), GGAgugagcc (SEQ ID NO: 5068), AAGgugcgcg (SEQ ID NO: 5069), GAAguacauc (SEQ ID NO: 5070), AGUgucugua (SEQ ID NO: 5071), CCCgugagcu (SEQ ID NO: 5072), GAGguucaca (SEQ ID NO: 5073), CUAgugggua (SEQ ID NO: 5074), GAGguaacua (SEQ ID NO: 5075), UCGguauguc (SEQ ID NO: 5076), UAAguauuug (SEQ ID NO: 5077), CAGguaagcg (SEQ ID NO: 5078), GAGgugguaa (SEQ ID NO: 5079), CGAguaagag (SEQ ID NO: 5080), CCGguaagcu (SEQ ID NO: 5081), GAGgucuugu (SEQ ID NO: 5082), AAGguggguc (SEQ ID NO: 5083), CACguaagug (SEQ ID NO: 5084), AGUguaauga (SEQ ID NO: 5085), AAAgugugua (SEQ ID NO: 5086), GGAgugccaa (SEQ ID NO: 5087), CACgugaguu (SEQ ID NO: 5088), AAGguuggau (SEQ ID NO: 5089), UAUguaaaua (SEQ ID NO: 5090), CUGguaggaa (SEQ ID NO: 5091), UAUguaaacu (SEQ ID NO: 5092), AAUguauuuu (SEQ ID NO: 5093), CUGgcaagug (SEQ ID NO: 5094), UGUgugguau (SEQ ID NO: 5095), UAUguauguu (SEQ ID NO: 5096), UUGgugacuc (SEQ ID NO: 5097), GGAguaaggu (SEQ ID NO: 5098), AAGguagaug (SEQ ID NO: 5099), UGGguagggu (SEQ ID NO: 5100), AAUguaauuc (SEQ ID NO: 5101), GUGguauggc (SEQ ID NO: 5102), GGAguggguu (SEQ ID NO: 5103), AGGguaccac (SEQ ID NO: 5104), UAGgugacag (SEQ ID NO: 5105), ACAguaggca (SEQ ID NO: 5106), AUGguuugaa (SEQ ID NO: 5107), GCAguaacua (SEQ ID NO: 5108), CCGguaggua (SEQ ID NO: 5109), AGAguaggcc (SEQ ID NO: 5110), AAGguugaca (SEQ ID NO: 5111), CUGgugugua (SEQ ID NO: 5112), GAAgucuguc (SEQ ID NO: 5113), UGGgcucgga (SEQ ID NO: 5114), CAGguagccu (SEQ ID NO: 5115), AGAguaggua (SEQ ID NO: 5116), UAAguauguc (SEQ ID NO: 5117), CUGguauauc (SEQ ID NO: 5118), GAGguguguu (SEQ ID NO: 5119), AUGgugcaug (SEQ ID NO: 5120), AAGguacgcc (SEQ ID NO: 5121), UGAguaacua (SEQ ID NO: 5122), GAGgugacag (SEQ ID NO: 5123), GUUguccugu (SEQ ID NO: 5124), UUGgugucuu (SEQ ID NO: 5125), AAUgugaagg (SEQ ID NO: 5126), UUGguggaua (SEQ ID NO: 5127), UAGguguguu (SEQ ID NO: 5128), CUGgcaaguu (SEQ ID NO: 5129), GCAguaagau (SEQ ID NO: 5130), GCGguggaaa (SEQ ID NO: 5131), UGCguccagc (SEQ ID NO: 5132), AAAguggagu (SEQ ID NO: 5133), CGUgugagcc (SEQ ID NO: 5134), AGAguacugu (SEQ ID NO: 5135), CAGguauagc (SEQ ID NO: 5136), UACguaagga (SEQ ID NO: 5137), AAGgucuuua (SEQ ID NO: 5138), AAGguggucu (SEQ ID NO: 5139), GGGguaaauu (SEQ ID NO: 5140), UCAgugagga (SEQ ID NO: 5141), AGAguacguu (SEQ ID NO: 5142), GAGgucguca (SEQ ID NO: 5143), UAGguuugau (SEQ ID NO: 5144), CAUguaaacc (SEQ ID NO: 5145), AAGguggcac (SEQ ID NO: 5146), CAGguagaug (SEQ ID NO: 5147), AACguaaaag (SEQ ID NO: 5148), UAGgucucug (SEQ ID NO: 5149), AUAguaggug (SEQ ID NO: 5150), UAGgcaagag (SEQ ID NO: 5151), UAGgcacggc (SEQ ID NO: 5152), AAGgucuuca (SEQ ID NO: 5153), CCAguaugcu (SEQ ID NO: 5154), CAAgugaguu (SEQ ID NO: 5155), CAGgucucaa (SEQ ID NO: 5156), CAGguuacau (SEQ ID NO: 5157), GGAgugagca (SEQ ID NO: 5158), AGAguacgca (SEQ ID NO: 5159), CUGguguugg (SEQ ID NO: 5160), AAGguacuca (SEQ ID NO: 5161), CUAguaaggg (SEQ ID NO: 5162), AGAguaaaag (SEQ ID NO: 5163), AAGguaacga (SEQ ID NO: 5164), CUGguccccg (SEQ ID NO: 5165), UAAguauggg (SEQ ID NO: 5166), GAGgucgagc (SEQ ID NO: 5167), UUGguauaua (SEQ ID NO: 5168), AAAgucaagg (SEQ ID NO: 5169), AAGgucuagg (SEQ ID NO: 5170), CGAguagguc (SEQ ID NO: 5171), AGGguucguu (SEQ ID NO: 5172), GAGgcaggcc (SEQ ID NO: 5173), CUAguauuac (SEQ ID NO: 5174), ACGguaugug (SEQ ID NO: 5175), UAGgugguuc (SEQ ID NO: 5176), AGAguauaac (SEQ ID NO: 5177), UUGgugcguc (SEQ ID NO: 5178), ACCguuaucu (SEQ ID NO: 5179), CCAgugauga (SEQ ID NO: 5180), GAAguaugca (SEQ ID NO: 5181), GAAguauggc (SEQ ID NO: 5182), CCGguaggac (SEQ ID NO: 5183), AAUguaagca (SEQ ID NO: 5184), AGAguaauug (SEQ ID NO: 5185), AGGguugguu (SEQ ID NO: 5186), GUGguaggag (SEQ ID NO: 5187), AAGgcaguuu (SEQ ID NO: 5188), CAAguaagcc (SEQ ID NO: 5189), CUGgcaagua (SEQ ID NO: 5190), CAGgcaugau (SEQ ID NO: 5191), AGGguaauug (SEQ ID NO: 5192), GGGguaaccu (SEQ ID NO: 5193), AAAguaacua (SEQ ID NO: 5194), UAGgucugcc (SEQ ID NO: 5195), ACGguaugaa (SEQ ID NO: 5196), AGUguauggg (SEQ ID NO: 5197), UGGguuggca (SEQ ID NO: 5198), UAGguaaacu (SEQ ID NO: 5199), AGAgugggua (SEQ ID NO: 5200), AGAguauuug (SEQ ID NO: 5201), AGUguaggaa (SEQ ID NO: 5202), CUUguacgua (SEQ ID NO: 5203), GAUgugagau (SEQ ID NO: 5204), CAGgcagcca (SEQ ID NO: 5205), AAGgucacug (SEQ ID NO: 5206), AAGgucugac (SEQ ID NO: 5207), UAGguuccuu (SEQ ID NO: 5208), CUGgugcuuu (SEQ ID NO: 5209), UGAguuggug (SEQ ID NO: 5210), UUGgugggau (SEQ ID NO: 5211), UGAguagggu (SEQ ID NO: 5212), UCGgugaggu (SEQ ID NO: 5213), AAAguaaaga (SEQ ID NO: 5214), AAGgcaaguc (SEQ ID NO: 5215), CGGguaaagc (SEQ ID NO: 5216), AAAguuaguu (SEQ ID NO: 5217), UUAguaagca (SEQ ID NO: 5218), GAGgucacau (SEQ ID NO: 5219), UAAgugguau (SEQ ID NO: 5220), UAGgugcuuu (SEQ ID NO: 5221), GGAguaggca (SEQ ID NO: 5222), UGAguaagga (SEQ ID NO: 5223), CAGguggagc (SEQ ID NO: 5224), GAUguagaag (SEQ ID NO: 5225), AAUgccugcc (SEQ ID NO: 5226), AUGguaaggc (SEQ ID NO: 5227), UGGguaauau (SEQ ID NO: 5228), CUGguaccuc (SEQ ID NO: 5229), CACgugagcc (SEQ ID NO: 5230), UGAguuugug (SEQ ID NO: 5231), CCGguagugu (SEQ ID NO: 5232), AAAgugacaa (SEQ ID NO: 5233), GAAguggguu (SEQ ID NO: 5234), CAGgugcagc (SEQ ID NO: 5235), GAGgugggcc (SEQ ID NO: 5236), UAUgugcguc (SEQ ID NO: 5237), GGGguacugg (SEQ ID NO: 5238), CUGguagguu (SEQ ID NO: 5239), UUGgcauguu (SEQ ID NO: 5240), AAUguaauac (SEQ ID NO: 5241), UAGgccggug (SEQ ID NO: 5242), AGAgucagua (SEQ ID NO: 5243), UAAguaaauc (SEQ ID NO: 5244), CAGguuccuc (SEQ ID NO: 5245), UAGguacgau (SEQ ID NO: 5246), AGAguuagug (SEQ ID NO: 5247), GCAguaagug (SEQ ID NO: 5248), AGGgugguag (SEQ ID NO: 5249), GGAguaaugu (SEQ ID NO: 5250), GAUguaaguc (SEQ ID NO: 5251), CCAguuucgu (SEQ ID NO: 5252), AAGguucggg (SEQ ID NO: 5253), AUGguggagu (SEQ ID NO: 5254), AAGguaccgg (SEQ ID NO: 5255), GAAgugcgaa (SEQ ID NO: 5256), UGGgucaguu (SEQ ID NO: 5257), AAGguguaga (SEQ ID NO: 5258), UGGguaggcc (SEQ ID NO: 5259), CCAgugaguc (SEQ ID NO: 5260), AAGgucacuu (SEQ ID NO: 5261), AGCgugaggc (SEQ ID NO: 5262), UCCgugguaa (SEQ ID NO: 5263), AGAguacuua (SEQ ID NO: 5264), GGGgucagau (SEQ ID NO: 5265), AAGguggacc (SEQ ID NO: 5266), AGAgugagcg (SEQ ID NO: 5267), AGAgucagau (SEQ ID NO: 5268), UAAguauuac (SEQ ID NO: 5269), AGAguauuuc (SEQ ID NO: 5270), AGAguucagc (SEQ ID NO: 5271), AUGgugaagu (SEQ ID NO: 5272), UAGgugaucc (SEQ ID NO: 5273), GGAguaagau (SEQ ID NO: 5274), UAGguaccaa (SEQ ID NO: 5275), AGAguugguc (SEQ ID NO: 5276), GAAgugagac (SEQ ID NO: 5277), AUCguagguu (SEQ ID NO: 5278), GAGguacgcu (SEQ ID NO: 5279), ACGguaaggg (SEQ ID NO: 5280), CAGgcauguc (SEQ ID NO: 5281), UUAguaagau (SEQ ID NO: 5282), UGAguagguu (SEQ ID NO: 5283), AGGguacgaa (SEQ ID NO: 5284), ACGguauguu (SEQ ID NO: 5285), AGGguacugu (SEQ ID NO: 5286), UUGguaugga (SEQ ID NO: 5287), UAAguaacug (SEQ ID NO: 5288), GCGgucagcc (SEQ ID NO: 5289), UUUgugaguc (SEQ ID NO: 5290), GUGgucagug (SEQ ID NO: 5291), CUGgucugua (SEQ ID NO: 5292), GAGguucuua (SEQ ID NO: 5293), AUGguacuga (SEQ ID NO: 5294), AAUgugcuuu (SEQ ID NO: 5295), AGGguggcgu (SEQ ID NO: 5296), CCGgcaggaa (SEQ ID NO: 5297), CAUguggguc (SEQ ID NO: 5298), UUGguuuguu (SEQ ID NO: 5299), CAGguucugu (SEQ ID NO: 5300), ACGguaagcg (SEQ ID NO: 5301), CUGgucagua (SEQ ID NO: 5302), UCAguaggcu (SEQ ID NO: 5303), UGAguaggac (SEQ ID NO: 5304), CAGguuuuaa (SEQ ID NO: 5305), GAGguguccc (SEQ ID NO: 5306), AGGguggguu (SEQ ID NO: 5307), GUGgugagac (SEQ ID NO: 5308), CACguaggga (SEQ ID NO: 5309), GUGguauuuu (SEQ ID NO: 5310), GAGauauccu (SEQ ID NO: 5311), AAGgugaaca (SEQ ID NO: 5312), UAAguagggc (SEQ ID NO: 5313), CUGgugcggg (SEQ ID NO: 5314), CUGgucaaua (SEQ ID NO: 5315), AGAguaaaaa (SEQ ID NO: 5316), AAGgugcagu (SEQ ID NO: 5317), CGGguaagca (SEQ ID NO: 5318), AAAgugagcc (SEQ ID NO: 5319), AUGguaauca (SEQ ID NO: 5320), GCAguacgug (SEQ ID NO: 5321), AUGguacaug (SEQ ID NO: 5322), AAGguuaaga (SEQ ID NO: 5323), CGGguaaaug (SEQ ID NO: 5324), GAGguucgca (SEQ ID NO: 5325), GAGgcucugg (SEQ ID NO: 5326), AUGgugggac (SEQ ID NO: 5327), AACgugguag (SEQ ID NO: 5328), AAGgugauag (SEQ ID NO: 5329), GGGguuugca (SEQ ID NO: 5330), CAUguaaggg (SEQ ID NO: 5331), UCAguugagu (SEQ ID NO: 5332), AAAgugcggc (SEQ ID NO: 5333), AGAgugagcc (SEQ ID NO: 5334), AUGgcaagaa (SEQ ID NO: 5335), ACAguaaggu (SEQ ID NO: 5336), AAGgucucua (SEQ ID NO: 5337), GUGguaaaaa (SEQ ID NO: 5338), AAAguaggug (SEQ ID NO: 5339), UAGgugcacu (SEQ ID NO: 5340), GUCgugguau (SEQ ID NO: 5341), CAGguauagg (SEQ ID NO: 5342), UGAgugagag (SEQ ID NO: 5343), ACUgugagcc (SEQ ID NO: 5344), AUCguuaguu (SEQ ID NO: 5345), UUUguaccaa (SEQ ID NO: 5346), UGGgugagau (SEQ ID NO: 5347), AGAgugagaa (SEQ ID NO: 5348), AGAguagggg (SEQ ID NO: 5349), AGGgcaagua (SEQ ID NO: 5350), CGGgucagua (SEQ ID NO: 5351), UUGguaugcc (SEQ ID NO: 5352), CGGguuagau (SEQ ID NO: 5353), GGGgugaagu (SEQ ID NO: 5354), CCCgugugaa (SEQ ID NO: 5355), GCAguuugga (SEQ ID NO: 5356), UGCguaagac (SEQ ID NO: 5357), AGAgucugua (SEQ ID NO: 5358), CACgugagca (SEQ ID NO: 5359), AGGguaaaag (SEQ ID NO: 5360), CAGgcugggu (SEQ ID NO: 5361), GAAgucuuca (SEQ ID NO: 5362), AAGgcaaaaa (SEQ ID NO: 5363), GUAguaaaua (SEQ ID NO: 5364), CUAgugagag (SEQ ID NO: 5365), GAAguuucug (SEQ ID NO: 5366), CCUguacgua (SEQ ID NO: 5367), GAGgugcgcg (SEQ ID NO: 5368), AAGguguaaa (SEQ ID NO: 5369), CCAguauguu (SEQ ID NO: 5370), CCGgucagcu (SEQ ID NO: 5371), AUGguuccug (SEQ ID NO: 5372), CAAguuaaau (SEQ ID NO: 5373), AGAguaggcu (SEQ ID NO: 5374), AUGgugggca (SEQ ID NO: 5375), GGAguaagac (SEQ ID NO: 5376), AGGgucacga (SEQ ID NO: 5377), UAGgugauau (SEQ ID NO: 5378), GAAguaaguc (SEQ ID NO: 5379), CGGguaagau (SEQ ID NO: 5380), CAAguagcua (SEQ ID NO: 5381), UGAguaaaau (SEQ ID NO: 5382), GUCguacgug (SEQ ID NO: 5383), AUGguacgua (SEQ ID NO: 5384), CAGgucucgg (SEQ ID NO: 5385), GAGgcauguc (SEQ ID NO: 5386), AGAgugggau (SEQ ID NO: 5387), GUGguuagag (SEQ ID NO: 5388), UGGgugguga (SEQ ID NO: 5389), AAGguuaaac (SEQ ID NO: 5390), CUUguuagcu (SEQ ID NO: 5391), AAAguaggaa (SEQ ID NO: 5392), UAGguuguau (SEQ ID NO: 5393), AGGgugcgcc (SEQ ID NO: 5394), AAGgugggcu (SEQ ID NO: 5395), UAAguaucug (SEQ ID NO: 5396), AAGguaacgu (SEQ ID NO: 5397), AUGguggggc (SEQ ID NO: 5398), CAAguacacg (SEQ ID NO: 5399), GGCguaagug (SEQ ID NO: 5400), AUAguaggac (SEQ ID NO: 5401), AGAgugaggu (SEQ ID NO: 5402), UUUguaaaaa (SEQ ID NO: 5403), GAAguuugua (SEQ ID NO: 5404), CUAguaaucu (SEQ ID NO: 5405), AAGguuuuua (SEQ ID NO: 5406), GAGgugcguu (SEQ ID NO: 5407), UAGgcgagua (SEQ ID NO: 5408), ACCgugagua (SEQ ID NO: 5409), CAGgucccga (SEQ ID NO: 5410), AUGguacugg (SEQ ID NO: 5411), UGAguucagu (SEQ ID NO: 5412), AAUguguggu (SEQ ID NO: 5413), UCCguugguu (SEQ ID NO: 5414), CAGgucagag (SEQ ID NO: 5415), CAGgucccua (SEQ ID NO: 5416), UAGguagacu (SEQ ID NO: 5417), CAAguuaagg (SEQ ID NO: 5418), GAGgugugcg (SEQ ID NO: 5419), GAAgcugccc (SEQ ID NO: 5420), CGAguacgug (SEQ ID NO: 5421), CGGguaggua (SEQ ID NO: 5422), UUGguauuga (SEQ ID NO: 5423), AUUguaugau (SEQ ID NO: 5424), UUGguaugaa (SEQ ID NO: 5425), GAGgugguca (SEQ ID NO: 5426), GCUguaugaa (SEQ ID NO: 5427), CAGguguugc (SEQ ID NO: 5428), CAGguaaaac (SEQ ID NO: 5429), AUAguaaggu (SEQ ID NO: 5430), CUGguuagag (SEQ ID NO: 5431), AGCgugugag (SEQ ID NO: 5432), AAGguuaucu (SEQ ID NO: 5433), CACgugagua (SEQ ID NO: 5434), AGGgucagua (SEQ ID NO: 5435), GAGguauaau (SEQ ID NO: 5436), CAGguuauuu (SEQ ID NO: 5437), AGGguggacu (SEQ ID NO: 5438), AUUguaauuc (SEQ ID NO: 5439), UUUguggguu (SEQ ID NO: 5440), AUGguacgug (SEQ ID NO: 5441), AAGguguucc (SEQ ID NO: 5442), CAGgugacgc (SEQ ID NO: 5443), GAGguacuaa (SEQ ID NO: 5444), ACAguucagu (SEQ ID NO: 5445), GAGgucacgg (SEQ ID NO: 5446), CAAguaaggc (SEQ ID NO: 5447), AAGguuuggg (SEQ ID NO: 5448), AAAgugggcu (SEQ ID NO: 5449), GCGguucuug (SEQ ID NO: 5450), GAGguggagc (SEQ ID NO: 5451), UGAgucagug (SEQ ID NO: 5452), CAGgucaagg (SEQ ID NO: 5453), AGUguaagcu (SEQ ID NO: 5454), GAGgcagaaa (SEQ ID NO: 5455), AAGgucacac (SEQ ID NO: 5456), GAAguagguu (SEQ ID NO: 5457), GUCguaaguu (SEQ ID NO: 5458), AGAguaugca (SEQ ID NO: 5459), CCUgugcaaa (SEQ ID NO: 5460), ACGgugaaaa (SEQ ID NO: 5461), CAGguacgaa (SEQ ID NO: 5462), CAUgugagga (SEQ ID NO: 5463), AGCgugagua (SEQ ID NO: 5464), GGUguguagg (SEQ ID NO: 5465), AACgugagcu (SEQ ID NO: 5466), GAGgugaacu (SEQ ID NO: 5467), AGAguucagu (SEQ ID NO: 5468), AACgugugua (SEQ ID NO: 5469), CAGguugugg (SEQ ID NO: 5470), AAGguacuag (SEQ ID NO: 5471), UCAgugaaaa (SEQ ID NO: 5472), AAUgucuggu (SEQ ID NO: 5473), ACGguaaaau (SEQ ID NO: 5474), CUGguguaag (SEQ ID NO: 5475), GAGgugcgaa (SEQ ID NO: 5476), AGGguuucuc (SEQ ID NO: 5477), CAGguagccc (SEQ ID NO: 5478), AUUguauugg (SEQ ID NO: 5479), AUGguacuua (SEQ ID NO: 5480), GAGgcccgac (SEQ ID NO: 5481), UCGguaagac (SEQ ID NO: 5482), CGGgcuguag (SEQ ID NO: 5483), UAUgugugug (SEQ ID NO: 5484), UAGguagaaa (SEQ ID NO: 5485), GUGgucauua (SEQ ID NO: 5486), UAGgugaaag (SEQ ID NO: 5487), ACUguaauuc (SEQ ID NO: 5488), GCAguacagg (SEQ ID NO: 5489), UCGgugaguc (SEQ ID NO: 5490), UAUguaggga (SEQ ID NO: 5491), AUGguauguc (SEQ ID NO: 5492), GUGgugugug (SEQ ID NO: 5493), CUGgugaccu (SEQ ID NO: 5494), AAUgugaaua (SEQ ID NO: 5495), UAGgucucac (SEQ ID NO: 5496), GAGguuauug (SEQ ID NO: 5497), UGAguaggcu (SEQ ID NO: 5498), CGGgcacgua (SEQ ID NO: 5499), GCAguaaaua (SEQ ID NO: 5500), CCGgugagag (SEQ ID NO: 5501), UAAguugguc (SEQ ID NO: 5502), CCGgugagcc (SEQ ID NO: 5503), AAGguuguca (SEQ ID NO: 5504), CUGguauuau (SEQ ID NO: 5505), GGGguauggg (SEQ ID NO: 5506), AAAgucagua (SEQ ID NO: 5507), UUUguaugua (SEQ ID NO: 5508), UAAguacugc (SEQ ID NO: 5509), CAGguaccaa (SEQ ID NO: 5510), GAAguucaga (SEQ ID NO: 5511), AUGgugcggu (SEQ ID NO: 5512), GUGgugaggu (SEQ ID NO: 5513), UGAguaagcc (SEQ ID NO: 5514), UAUguaaggg (SEQ ID NO: 5515), GUGguggaaa (SEQ ID NO: 5516), GAGgugauug (SEQ ID NO: 5517), GGAguuugua (SEQ ID NO: 5518), AAGgucacga (SEQ ID NO: 5519), GUGguagagg (SEQ ID NO: 5520), UAAguauauc (SEQ ID NO: 5521), AAGgugucca (SEQ ID NO: 5522), UAUgugguau (SEQ ID NO: 5523), GAGguacaau (SEQ ID NO: 5524), AAGguggggg (SEQ ID NO: 5525), GGAguaggug (SEQ ID NO: 5526), and UAGgugacuu (SEQ ID NO: 5527).

[0162] In some embodiments, the splice site sequence (e.g., 5′ splice site sequence) comprises AGA. In some embodiments, the splice site sequence (e.g., 5′ splice site sequence) comprises AAA. In some embodiments, the splice site sequence (e.g., 5′ splice site sequence) comprises AAC. In some embodiments, the splice site sequence (e.g., 5′ splice site sequence) comprises AAU. In some embodiments, the splice site sequence (e.g., 5′ splice site sequence) comprises AAG. In some embodiments, the splice site sequence (e.g., 5′ splice site sequence) comprises ACA. In some embodiments, the splice site sequence (e.g., 5′ splice site sequence) comprises AUA. In some embodiments, the splice site sequence (e.g., 5′ splice site sequence) comprises AUU. In some embodiments, the splice site sequence (e.g., 5′ splice site sequence) comprises AUG. In some embodiments, the splice site sequence (e.g., 5′ splice site sequence) comprises AUC. In some embodiments, the splice site sequence (e.g., 5′ splice site sequence) comprises CAA. In some embodiments, the splice site sequence (e.g., 5′ splice site sequence) comprises CAU. In some embodiments, the splice site sequence (e.g., 5′ splice site sequence) comprises CAC. In some embodiments, the splice site sequence (e.g., 5′ splice site sequence) comprises CAG. In some embodiments, the splice site sequence (e.g., 5′ splice site sequence) comprises GAA. In some embodiments, the splice site sequence (e.g., 5′ splice site sequence) comprises GAC. In some embodiments, the splice site sequence (e.g., 5′ splice site sequence) comprises GAU. In some embodiments, the splice site sequence (e.g., 5′ splice site sequence) comprises GAG. In some embodiments, the splice site sequence (e.g., 5′ splice site sequence) comprises GGA. In some embodiments, the splice site sequence (e.g., 5′ splice site sequence) comprises GCA. In some embodiments, the splice site sequence (e.g., 5′ splice site sequence) comprises GGG. In some embodiments, the splice site sequence (e.g., 5′ splice site sequence) comprises GGC. In some embodiments, the splice site sequence (e.g., 5′ splice site sequence) comprises GUU. In some embodiments, the splice site sequence (e.g., 5′ splice site sequence) comprises GGU. In some embodiments, the splice site sequence (e.g., 5′ splice site sequence) comprises GUC. In some embodiments, the splice site sequence (e.g., 5′ splice site sequence) comprises GUA. In some embodiments, the splice site sequence (e.g., 5′ splice site sequence) comprises GUG. In some embodiments, the splice site sequence (e.g., 5′ splice site sequence) comprises UCU. In some embodiments, the splice site sequence (e.g., 5′ splice site sequence) comprises UCC. In some embodiments, the splice site sequence (e.g., 5′ splice site sequence) comprises UCA. In some embodiments, the splice site sequence (e.g., 5′ splice site sequence) comprises UCG. In some embodiments, the splice site sequence (e.g., 5′ splice site sequence) comprises UUU. In some embodiments, the splice site sequence (e.g., 5′ splice site sequence) comprises UUC. In some embodiments, the splice site sequence (e.g., 5′ splice site sequence) comprises UUA. In some embodiments, the splice site sequence (e.g., 5′ splice site sequence) comprises UUG. In some embodiments, the splice site sequence (e.g., 5′ splice site sequence) comprises UGU. In some embodiments, the splice site sequence (e.g., 5′ splice site sequence) comprises UAU. In some embodiments, the splice site sequence (e.g., 5′ splice site sequence) comprises GGA. In some embodiments, the splice site sequence (e.g., 5′ splice site sequence) comprises CUU. In some embodiments, the splice site sequence (e.g., 5′ splice site sequence) comprises CUC. In some embodiments, the splice site sequence (e.g., 5′ splice site sequence) comprises CUA. In some embodiments, the splice site sequence (e.g., 5′ splice site sequence) comprises CUG. In some embodiments, the splice site sequence (e.g., 5′ splice site sequence) comprises CCU. In some embodiments, the splice site sequence (e.g., 5′ splice site sequence) comprises CCC. In some embodiments, the splice site sequence (e.g., 5′ splice site sequence) comprises CCA. In some embodiments, the splice site sequence (e.g., 5′ splice site sequence) comprises CCG. In some embodiments, the splice site sequence (e.g., 5′ splice site sequence) comprises ACU. In some embodiments, the splice site sequence (e.g., 5′ splice site sequence) comprises ACC. In some embodiments, the splice site sequence (e.g., 5′ splice site sequence) comprises ACG. In some embodiments, the splice site sequence (e.g., 5′ splice site sequence) comprises AGC. In some embodiments, the splice site sequence (e.g., 5′ splice site sequence) comprises AGU. In some embodiments, the splice site sequence (e.g., 5′ splice site sequence) comprises AGG. In some embodiments, the splice site sequence (e.g., 5′ splice site sequence) comprises CGU. In some embodiments, the splice site sequence (e.g., 5′ splice site sequence) comprises UAC. In some embodiments, the splice site sequence (e.g., 5′ splice site sequence) comprises UAA. In some embodiments, the splice site sequence (e.g., 5′ splice site sequence) comprises UAG. In some embodiments, the splice site sequence (e.g., 5′ splice site sequence) comprises CGC. In some embodiments, the splice site sequence (e.g., 5′ splice site sequence) comprises CGA. In some embodiments, the splice site sequence (e.g., 5′ splice site sequence) comprises CGG. In some embodiments, the splice site sequence comprises AGAguaaggg (SEQ ID NO: 667). In some embodiments, the splice site sequence comprises UGAguaagca (SEQ ID NO: 2768).

[0163] In an embodiment, a gene sequence or splice site sequence provided herein is related to a proliferative disease, disorder, or condition (e.g., cancer, benign neoplasm, or inflammatory disease). In an embodiment, a gene sequence or splice site sequence provided herein is related to a non-proliferative disease, disorder, or condition. In an embodiment, a gene sequence or splice site sequence provided herein is related to a neurological disease or disorder; autoimmune disease or disorder; immunodeficiency disease or disorder; lysosomal storage disease or disorder; cardiovascular condition, disease or disorder; metabolic disease or disorder; respiratory condition, disease, or disorder; renal disease or disorder; or infectious disease in a subject. In an embodiment, a gene sequence or splice site sequence provided herein is related to a neurological disease or disorder (e.g., Huntington's disease). In an embodiment, a gene sequence or splice site sequence provided herein is related to an immunodeficiency disease or disorder. In an embodiment, a gene sequence or splice site sequence provided herein is related to a lysosomal storage disease or disorder. In an embodiment, a gene sequence or splice site sequence provided herein is related to a cardiovascular condition, disease or disorder. In an embodiment, a gene sequence or splice site sequence provided herein is related to a metabolic disease or disorder. In an embodiment, a gene sequence or splice site sequence provided herein is related to a respiratory condition, disease, or disorder. In an embodiment, a gene sequence or splice site sequence provided herein is related to a renal disease or disorder. In an embodiment, a gene sequence or splice site sequence provided herein is related to an infectious disease.

[0164] In an embodiment, a gene sequence or splice site sequence provided herein is related to a mental retardation disorder. In an embodiment, a gene sequence or splice site sequence provided herein is related to a mutation in the SETD5 gene. In an embodiment, a gene sequence or splice site sequence provided herein is related to an immunodeficiency disorder. In an embodiment, a gene sequence and splice site sequence provided herein is related to a mutation in the GATA2 gene. In an embodiment, a gene sequence or splice site sequence provided herein is related to a lysosomal storage disease.

[0165] In some embodiments, a compound of Formula (I) described herein interacts with (e.g., binds to) a splicing complex component (e.g., a nucleic acid (e.g., an RNA) or a protein). In some embodiments, the splicing complex component is selected from 9G8, A1 hnRNP, A2 hnRNP, ASD-1, ASD-2b, ASF, BRR2, B1 hnRNP, C1 hnRNP, C2 hnRNP, CBP20, CBP80, CELF, F hnRNP, FBP11, Fox-1, Fox-2, G hnRNP, H hnRNP, hnRNP 1, hnRNP 3, hnRNP C, hnRNP G, hnRNP K, hnRNP M, hnRNP U, Hu, HUR, I hnRNP, K hnRNP, KH-type splicing regulatory protein (KSRP), L hnRNP, LUC7L, M hnRNP, mBBP, muscle-blind like (MBNL), NF45, NFAR, Nova-1, Nova-2, nPTB, P54/SFRS11, polypyrimidine tract binding protein (PTB), a PRP protein (e.g., PRP8, PRP6, PRP31, PRP4, PRP3, PRP28, PRP5, PRP2, PRP19), PRP19 complex proteins, RBM42, R hnRNP, RNPC1, SAD1, SAM68, SC35, SF, SF1/BBP, SF2, SF3A complex, SF3B complex, SFRS10, an Sm protein (such as B, D1, D2, D3, F, E, G), SNU17, SNU66, SNU114, an SR protein, SRm300, SRp20, SRp30c, SRP35C, SRP36, SRP38, SRp40, SRp55, SRp75, SRSF, STAR, GSG, SUP-12, TASR-1, TASR-2, TIA, TIAR, TRA2, TRA2a/b, U hnRNP, U1 snRNP, U11 snRNP, U12 snRNP, U1-70K, U1-A, U1-C, U2 snRNP, U2AF1-RS2, U2AF35, U2AF65, U4 snRNP, U5 snRNP, U6 snRNP, Urp, and YB1.

[0166] In some embodiments, the splicing complex component comprises RNA (e.g., snRNA). In some embodiments, a compound described herein binds to a splicing complex component comprising snRNA. The snRNA may be selected from, e.g., U1 snRNA, U2 snRNA, U4 snRNA, U5 snRNA, U6 snRNA, U11 snRNA, U12 snRNA, U4atac snRNA, and any combination thereof.

[0167] In some embodiments, the splicing complex component comprises a protein, e.g., a protein associated with an snRNA. In some embodiments, the protein comprises SC35, SRp55, SRp40, SRm300, SFRS10, TASR-1, TASR-2, SF2/ASF, 9G8, SRp75, SRp30c, SRp20 and P54/SFRS11. In some embodiments, the splicing complex component comprises a U2 snRNA auxiliary factor (e.g., U2AF65, U2AF35), Urp/U2AF1-RS2, SF1/BBP, CBP80, CBP 20, SF1 or PTB/hnRNP1. In some embodiments, the hnRNP protein comprises A1, A2/B1, L, M, K, U, F, H, G, R, I or C1/C2. Human genes encoding hnRNPs include HNRNPA0, HNRNPA1, HNRNPA1L1, HNRNPA1L2, HNRNPA3, HNRNPA2B1, HNRNPAB, HNRNPB1, HNRNPC, HNRNPCL1, HNRNPD, HNRPDL, HNRNPF, HNRNPH1, HNRNPH2, HNRNPH3, HNRNPK, HNRNPL, HNRPLL, HNRNPM, HNRNPR, HNRNPU, HNRNPUL1, HNRNPUL2, HNRNPUL3, and FMR1.

[0168] In one aspect, the compounds of Formula (I) and pharmaceutically acceptable salts, solvates, hydrates, tautomers, stereoisomers, and compositions thereof, may modulate (e.g., increase or decrease) a splicing event of a target nucleic acid sequence (e.g., DNA, RNA, or a pre-mRNA), for example, a nucleic acid encoding a gene described herein, or a nucleic acid encoding a protein described herein, or a nucleic acid comprising a splice site described herein. In an embodiment, the splicing event is an alternative splicing event.

[0169] In an embodiment, the compound of Formula (I) or a pharmaceutically acceptable salt, solvate, hydrate, tautomer, stereoisomer, and compositions thereof increases splicing at splice site on a target nucleic acid (e.g., an RNA, e.g., a pre-mRNA), by about 0.5%, 1%, 2%, 3%, 4%, 5%, 6%7, 7%, 8%, 9%, 10%, 15%, 20%, 25%, 30%, 35%, 40%, 45%, 50%, 55%, 60%, 65%, 70%, 75%, 80%, 85%, 90%, 95%, or more, e.g., as determined by a known method in the art, e.g., qPCR. In an embodiment, the compound of Formula (I) or a pharmaceutically acceptable salt, solvate, hydrate, tautomer, stereoisomer, and compositions thereof decreases splicing at splice site on a target nucleic acid (e.g., an RNA, e.g., a pre-mRNA), by about 0.5%, 1%, 2%, 3%, 4%, 5%, 6%, 7%, 8%, 9%, 10%, 15%, 20%, 25%, 30%, 35%, 40%, 45%, 50%, 55%, 60%, 65%, 70%, 75%, 80%, 85%, 90%, 95%, or more, e.g., as determined by a known method in the art, e.g., qPCR.

[0170] In another aspect, the present disclosure features a method of forming a complex comprising a component of a spliceosome (e.g., a major spliceosome component or a minor spliceosome component), a nucleic acid (e.g., a DNA, RNA, e.g., a pre-mRNA), and a compound of Formula (I) or a pharmaceutically acceptable salt, solvate, hydrate, tautomer, stereoisomer, or composition thereof, comprising contacting the nucleic acid (e.g., a DNA, RNA, e.g., a pre-mRNA) with said compound of Formula (I). In an embodiment, the component of a spliceosome is selected from the U1, U2, U4, U5, U6, U11, U12, U4atac, U6atac small nuclear ribonucleoproteins (snRNPs), or a related accessory factor. In an embodiment, the component of a spliceosome is recruited to the nucleic acid in the presence of the compound of Formula (I) or a pharmaceutically acceptable salt, solvate, hydrate, tautomer, stereoisomer, or composition thereof.

[0171] In another aspect, the present disclosure features a method of altering the conformation of a nucleic acid (e.g., a DNA, RNA, e.g., a pre-mRNA) comprising contacting the nucleic acid with a compound of Formula (I) or a pharmaceutically acceptable salt, solvate, hydrate, tautomer, stereoisomer, or composition thereof. In an embodiment, the altering comprises forming a bulge or kink in the nucleic acid. In an embodiment, the altering comprises stabilizing a bulge or a kink in the nucleic acid. In an embodiment, the altering comprises reducing a bulge or a kink in the nucleic acid. In an embodiment, the nucleic acid comprises a splice site. In an embodiment, the compound of Formula (I) interacts with a nucleobase, ribose, or phosphate moiety of a nucleic acid (e.g., a DNA, RNA, e.g., pre-mRNA).

[0172] The present disclosure also provides methods for the treatment or prevention of a disease, disorder, or condition. In an embodiment, the disease, disorder or condition is related to (e.g., caused by) a splicing event, such as an unwanted, aberrant, or alternative splicing event. In an embodiment, the disease, disorder or condition comprises a proliferative disease (e.g., cancer, benign neoplasm, or inflammatory disease) or non-proliferative disease. In an embodiment, the disease, disorder, or condition comprises a neurological disease, autoimmune disorder, immunodeficiency disorder, cardiovascular condition, metabolic disorder, lysosomal storage disease, respiratory condition, renal disease, or infectious disease in a subject. In another embodiment, the disease, disorder, or condition comprises a haploinsufficiency disease, an autosomal recessive disease (e.g., with residual function), or a paralogue activation disorder. In another embodiment, the disease, disorder, or condition comprises an autosomal dominant disorder (e.g., with residual function). Such methods comprise the step of administering to the subject in need thereof an effective amount of a compound of Formula (I), or a pharmaceutically acceptable salt, solvate, hydrate, tautomer, stereoisomer thereof, or a pharmaceutical composition thereof. In certain embodiments, the methods described herein include administering to a subject an effective amount of a compound of Formula (I), or a pharmaceutically acceptable salt thereof, or a pharmaceutical composition thereof.

[0173] In certain embodiments, the subject being treated is a mammal. In certain embodiments, the subject is a human. In certain embodiments, the subject is a domesticated animal, such as a dog, cat, cow, pig, horse, sheep, or goat. In certain embodiments, the subject is a companion animal such as a dog or cat. In certain embodiments, the subject is a livestock animal such as a cow, pig, horse, sheep, or goat. In certain embodiments, the subject is a zoo animal. In another embodiment, the subject is a research animal such as a rodent, dog, or non-human primate. In certain embodiments, the subject is a non-human transgenic animal such as a transgenic mouse or transgenic pig.

[0174] A proliferative disease may also be associated with inhibition of apoptosis of a cell in a biological sample or subject. All types of biological samples described herein or known in the art are contemplated as being within the scope of the disclosure. The compounds of Formula (I) and pharmaceutically acceptable salts, solvates, hydrates, tautomers, stereoisomers, and compositions thereof, may induce apoptosis, and therefore, be useful in treating and/or preventing proliferative diseases.

[0175] In certain embodiments, the proliferative disease to be treated or prevented using the compounds of Formula (I) is cancer. As used herein, the term “cancer” refers to a malignant neoplasm (Stedman's Medical Dictionary, 25th ed.; Hensyl ed.; Williams & Wilkins: Philadelphia, 1990). All types of cancers disclosed herein or known in the art are contemplated as being within the scope of the disclosure. Exemplary cancers include, but are not limited to, acoustic neuroma; adenocarcinoma; adrenal gland cancer; anal cancer; angiosarcoma (e.g., lymphangiosarcoma, lymphangioendotheliosarcoma, hemangiosarcoma); appendix cancer; benign monoclonal gammopathy; biliary cancer (e.g., cholangiocarcinoma); bladder cancer; breast cancer (e.g., adenocarcinoma of the breast, papillary carcinoma of the breast, mammary cancer, medullary carcinoma of the breast); brain cancer (e.g., meningioma, glioblastomas, glioma (e.g., astrocytoma, oligodendroglioma), medulloblastoma); bronchus cancer; carcinoid tumor; cervical cancer (e.g., cervical adenocarcinoma); choriocarcinoma; chordoma; craniopharyngioma; colorectal cancer (e.g., colon cancer, rectal cancer, colorectal adenocarcinoma); connective tissue cancer; epithelial carcinoma; ependymoma; endotheliosarcoma (e.g., Kaposi's sarcoma, multiple idiopathic hemorrhagic sarcoma); endometrial cancer (e.g., uterine cancer, uterine sarcoma); esophageal cancer (e.g., adenocarcinoma of the esophagus, Barrett's adenocarcinoma); Ewing's sarcoma; eye cancer (e.g., intraocular melanoma, retinoblastoma); familiar hypereosinophilia; gall bladder cancer; gastric cancer (e.g., stomach adenocarcinoma); gastrointestinal stromal tumor (GIST); germ cell cancer; head and neck cancer (e.g., head and neck squamous cell carcinoma, oral cancer (e.g., oral squamous cell carcinoma), throat cancer (e.g., laryngeal cancer, pharyngeal cancer, nasopharyngeal cancer, oropharyngeal cancer), e.g., adenoid cystic carcinoma (ACC)); hematopoietic cancers (e.g., leukemia such as acute lymphocytic leukemia (ALL) (e.g., B-cell ALL, T-cell ALL), acute myelocytic leukemia (AIL) (e.g., B-cell AIL, T-cell AIL), chronic myelocytic leukemia (CML) (e.g., B-cell CML, T-cell CML), and chronic lymphocytic leukemia (CLL) (e.g., B-cell CLL, T-cell CLL)); lymphoma such as Hodgkin lymphoma (HL) (e.g., B-cell HL, T-cell HL) and non-Hodgkin lymphoma (NHL) (e.g., B-cell NHL such as diffuse large cell lymphoma (DLCL) (e.g., diffuse large B-cell lymphoma), follicular lymphoma, chronic lymphocytic leukemia/small lymphocytic lymphoma (CLL/SLL), mantle cell lymphoma (MCL), marginal zone B-cell lymphomas (e.g., mucosa-associated lymphoid tissue (MALT) lymphomas, nodal marginal zone B-cell lymphoma, splenic marginal zone B-cell lymphoma), primary mediastinal B-cell lymphoma, Burkitt lymphoma, lymphoplasmacytic lymphoma (i.e., Waldenstrom's macroglobulinemia), hairy cell leukemia (HCL), immunoblastic large cell lymphoma, precursor B-lymphoblastic lymphoma and primary central nervous system (CNS) lymphoma; and T-cell NHL such as precursor T-lymphoblastic lymphoma/leukemia, peripheral T-cell lymphoma (PTCL) (e.g., cutaneous T-cell lymphoma (CTCL) (e.g., mycosis fungoides, Sezary syndrome), angioimmunoblastic T-cell lymphoma, extranodal natural killer T-cell lymphoma, enteropathy type T-cell lymphoma, subcutaneous panniculitis-like T-cell lymphoma, and anaplastic large cell lymphoma); a mixture of one or more leukemia/lymphoma as described above; and multiple myeloma (MM)), heavy chain disease (e.g., alpha chain disease, gamma chain disease, mu chain disease); hemangioblastoma; hypopharynx cancer; inflammatory myofibroblastic tumors; immunocytic amyloidosis; kidney cancer (e.g., nephroblastoma a.k.a. Wilms' tumor, renal cell carcinoma); liver cancer (e.g., hepatocellular cancer (HCC), malignant hepatoma); lung cancer (e.g., bronchogenic carcinoma, small cell lung cancer (SCLC), non-small cell lung cancer (NSCLC), adenocarcinoma of the lung); leiomyosarcoma (LMS); mastocytosis (e.g., systemic mastocytosis); muscle cancer; myelodysplastic syndrome (MDS); mesothelioma; myeloproliferative disorder (MPD) (e.g., polycythemia vera (PV), essential thrombocytosis (ET), agnogenic myeloid metaplasia (AMM) a.k.a. myelofibrosis (MF), chronic idiopathic myelofibrosis, chronic myelocytic leukemia (CML), chronic neutrophilic leukemia (CNL), hypereosinophilic syndrome (HES)); neuroblastoma; neurofibroma (e.g., neurofibromatosis (NF) type 1 or type 2, schwannomatosis); neuroendocrine cancer (e.g., gastroenteropancreatic neuroendocrine tumor (GEP-NET), carcinoid tumor); osteosarcoma (e.g., bone cancer); ovarian cancer (e.g., cystadenocarcinoma, ovarian embryonal carcinoma, ovarian adenocarcinoma); papillary adenocarcinoma; pancreatic cancer (e.g., pancreatic adenocarcinoma, intraductal papillary mucinous neoplasm (IPMN), Islet cell tumors); penile cancer (e.g., Paget's disease of the penis and scrotum); pinealoma; primitive neuroectodermal tumor (PNT); plasma cell neoplasia; paraneoplastic syndromes; intraepithelial neoplasms; prostate cancer (e.g., prostate adenocarcinoma); rectal cancer; rhabdomyosarcoma; salivary gland cancer; skin cancer (e.g., squamous cell carcinoma (SCC), keratoacanthoma (KA), melanoma, basal cell carcinoma (BCC)); small bowel cancer (e.g., appendix cancer); soft tissue sarcoma (e.g., malignant fibrous histiocytoma (MFH), liposarcoma, malignant peripheral nerve sheath tumor (MPNST), chondrosarcoma, fibrosarcoma, myxosarcoma); sebaceous gland carcinoma; small intestine cancer; sweat gland carcinoma; synovioma; testicular cancer (e.g., seminoma, testicular embryonal carcinoma); thyroid cancer (e.g., papillary carcinoma of the thyroid, papillary thyroid carcinoma (PTC), medullary thyroid cancer); urethral cancer; vaginal cancer; and vulvar cancer (e.g., Paget's disease of the vulva).

[0176] In some embodiments, the cancer is selected from adenoid cystic carcinoma (ACC), acute myelocytic leukemia (AML) (e.g., B-cell AML, T-cell AML), chronic myelocytic leukemia (CML) (e.g., B-cell CML, T-cell CML), non-Hodgkin lymphoma (NHL), Burkitt lymphoma, colorectal cancer (e.g., colon cancer, rectal cancer, colorectal adenocarcinoma), prostate cancer (e.g., prostate adenocarcinoma), ovarian cancer (e.g., cystadenocarcinoma, ovarian embryonal carcinoma, ovarian adenocarcinoma), and myelodysplastic syndrome (MDS).

[0177] In some embodiments, the proliferative disease is associated with a benign neoplasm. For example, a benign neoplasm may include adenoma, fibroma, hemangioma, tuberous sclerosis, and lipoma. All types of benign neoplasms disclosed herein or known in the art are contemplated as being within the scope of the disclosure.

[0178] In some embodiments, the proliferative disease is associated with angiogenesis. All types of angiogenesis disclosed herein or known in the art are contemplated as being within the scope of the disclosure.

[0179] In some embodiments, the compound of Formula (I) or a pharmaceutically acceptable salt thereof, or compositions comprising such compound or pharmaceutically acceptable salt thereof, is used to prevent or treat a non-proliferative disease. Exemplary non-proliferative diseases include a neurological disease, autoimmune disorder, immunodeficiency disorder, lysosomal storage disease, cardiovascular condition, metabolic disorder, respiratory condition, inflammatory disease, renal disease, or infectious disease.

[0180] In certain embodiments, the non-proliferative disease is a neurological disease. In certain embodiments, the compound of Formula (I), or a pharmaceutically acceptable salt thereof, or compositions comprising such compound or pharmaceutically acceptable salt thereof, is used to prevent or treat a neurological disease, disorder, or condition. A neurological disease, disorder, or condition may include a neurodegenerative disease, a psychiatric condition, or a musculoskeletal disease. A neurological disease may further include a repeat expansion disease, e.g., which may be characterized by the expansion of a nucleic acid sequence in the genome. For example, a repeat expansion disease includes myotonic dystrophy, amyotrophic lateral sclerosis, Huntington's disease, a trinucleotide repeat disease, or a polyglutamine disorder (e.g., ataxia, fragile X syndrome). In some embodiments, the neurological disease comprises a repeat expansion disease, e.g., Huntington's disease. Additional neurological diseases, disorders, and conditions include Alzheimer's disease, Huntington's chorea, a prion disease (e.g., Creutzfeld-Jacob disease, bovine spongiform encephalopathy, Kuru, or scrapie), a mental retardation disorder (e.g., a disorder caused by a SETD5 gene mutation, e.g., intellectual disability-facial dysmorphism syndrome, autism spectrum disorder), Lewy Body disease, diffuse Lewy body disease (DLBD), dementia, progressive supranuclear palsy (PSP), progressive bulbar palsy (PBP), psuedobulbar palsy, spinal and bulbar muscular atrophy (SBMA), primary lateral sclerosis, Pick's disease, primary progressive aphasia, corticobasal dementia, Parkinson's disease, Down's syndrome, multiple system atrophy, spinal muscular atrophy (SMA), progressive spinobulbar muscular atrophy (e.g., Kennedy disease), post-polio syndrome (PPS), spinocerebellar ataxia, pantothenate kinase-associated neurodegeneration (PANK), spinal degenerative disease/motor neuron degenerative diseases, upper motor neuron disorder, lower motor neuron disorder, Hallervorden-Spatz syndrome, cerebral infarction, cerebral trauma, chronic traumatic encephalopathy, transient ischemic attack, Lytigo-bodig (amyotrophic lateral sclerosis-parkinsonism dementia), Guam-Parkinsonism dementia, hippocampal sclerosis, corticobasal degeneration, Alexander disease, Apler's disease, Krabbe's disease, neuroborreliosis, neurosyphilis, Sandhoff disease, Tay-Sachs disease, Schilder's disease, Batten disease, Cockayne syndrome, Kearns-Sayre syndrome, Gerstmann-Straussler-Scheinker syndrome and other transmissible spongiform encephalopathies, hereditary spastic paraparesis, Leigh's syndrome, a demyelinating diseases, neuronal ceroid lipofuscinoses, epilepsy, tremors, depression, mania, anxiety and anxiety disorders, sleep disorders (e.g., narcolepsy, fatal familial insomnia), acute brain injuries (e.g., stroke, head injury), autism, Machado-Joseph disease, or a combination thereof. In some embodiments, the neurological disease comprises Friedrich's ataxia or Sturge Weber syndrome. In some embodiments, the neurological disease comprises Huntington's disease. In some embodiments, the neurological disease comprises spinal muscular atrophy. All types of neurological diseases disclosed herein or known in the art are contemplated as being within the scope of the disclosure.

[0181] In certain embodiments, the non-proliferative disease is an autoimmune disorder or an immunodeficiency disorder. In certain embodiments, the compound of Formula (I) or a pharmaceutically acceptable salt thereof, or compositions comprising such compound or pharmaceutically acceptable salt thereof, is used to prevent or treat an autoimmune disease, disorder, or condition, or an immunodeficiency disease, disorder, or condition. Exemplary autoimmune and immunodeficiency diseases, disorders, and conditions include arthritis (e.g., rheumatoid arthritis, osteoarthritis, gout), Chagas disease, chronic obstructive pulmonary disease (COPD), dermatomyositis, diabetes mellitus type 1, endometriosis, Goodpasture's syndrome, Graves' disease, Guillain-Barre syndrome (GBS), Hashiomoto's disease, Hidradenitis suppurativa, Kawasaki disease, ankylosing spondylitis, IgA nephropathy, idiopathic thrombocytopenic purpura, inflammatory bowel disease, Crohn's disease, ulcerative colitis, collagenous colitis, lymphocytic colitis, ischemic colitis, diversion colitis, Behcet's syndrome, infective colitis, indeterminate colitisinterstitial cystitis, lupus (e.g., systemic lupus erythematosus, discoid lupus, drug-induced lupus, neonatal lupus), mixed connective tissue disease, morphea, multiple sclerosis, myasthenia gravis, narcolepsy, neuromyotonia, pemphigus vulgaris, pernicious anemia, psoriasis, psoriatic arthritis, polymyositis, primary biliary cirrhosis, relapsing polychondritis, scleroderma, Sjögren's syndrome, Stiff person syndrome, vasculitis, vitiligo, a disorder caused by a GATA2 mutation (e.g., GATA2 deficiency; GATA2 haploinsufficiency; Emberger syndrome; monocytopenia and Mycobacterium avium complex/dendritic cell, monocyte, B and NK lymphocyte deficiency; familial myelodysplastic syndrome; acute myeloid leukemia; chronic myelomonocytic leukemia), neutropenia, aplastic anemia, and Wegener's granulomatosis. In some embodiments, the autoimmune or immunodeficiency disorder comprises chronic mucocutaneous candidiasis. All types of autoimmune disorders and immunodeficiency disorders disclosed herein or known in the art are contemplated as being within the scope of the disclosure.

[0182] In certain embodiments, the non-proliferative disease is a cardiovascular condition. In certain embodiments, the compound of Formula (I) or a pharmaceutically acceptable salt thereof, or compositions comprising such compound or pharmaceutically acceptable salt thereof, is used to prevent or treat a cardiovascular disease, disorder, or condition. A cardiovascular disease, disorder, or condition may include a condition relating to the heart or vascular system, such as the arteries, veins, or blood. Exemplary cardiovascular diseases, disorders, or conditions include angina, arrhythmias (atrial or ventricular or both), heart failure, arteriosclerosis, atheroma, atherosclerosis, cardiac hypertrophy, cardiac or vascular aneurysm, cardiac myocyte dysfunction, carotid obstructive disease, endothelial damage after PTCA (percutaneous transluminal coronary angioplasty), hypertension including essential hypertension, pulmonary hypertension and secondary hypertension (renovascular hypertension, chronic glomerulonephritis), myocardial infarction, myocardial ischemia, peripheral obstructive arteriopathy of a limb, an organ, or a tissue; peripheral artery occlusive disease (PAOD), reperfusion injury following ischemia of the brain, heart or other organ or tissue, restenosis, stroke, thrombosis, transient ischemic attack (TIA), vascular occlusion, vasculitis, and vasoconstriction. All types of cardiovascular diseases, disorders, or conditions disclosed herein or known in the art are contemplated as being within the scope of the disclosure.

[0183] In certain embodiments, the non-proliferative disease is a metabolic disorder. In certain embodiments, the compound of Formula (I) or a pharmaceutically acceptable salt thereof, or compositions comprising such compound or pharmaceutically acceptable salt thereof, is used to prevent or treat a metabolic disease, disorder, or condition. A metabolic disease, disorder, or condition may include a disorder or condition that is characterized by abnormal metabolism, such as those disorders relating to the consumption of food and water, digestion, nutrient processing, and waste removal. A metabolic disease, disorder, or condition may include an acid-base imbalance, a mitochondrial disease, a wasting syndrome, a malabsorption disorder, an iron metabolism disorder, a calcium metabolism disorder, a DNA repair deficiency disorder, a glucose metabolism disorder, hyperlactatemia, a disorder of the gut microbiota. Exemplary metabolic conditions include obesity, diabetes (Type I or Type II), insulin resistance, glucose intolerance, lactose intolerance, eczema, hypertension, Hunter syndrome, Krabbe disease, sickle cell anemia, maple syrup urine disease, Pompe disease, and metachromatic leukodystrophy. All types of metabolic diseases, disorders, or conditions disclosed herein or known in the art are contemplated as being within the scope of the disclosure.

[0184] In certain embodiments, the non-proliferative disease is a respiratory condition. In certain embodiments, the compound of Formula (I) or a pharmaceutically acceptable salt thereof, or compositions comprising such compound or pharmaceutically acceptable salt thereof, is used to prevent or treat a respiratory disease, disorder, or condition. A respiratory disease, disorder, or condition can include a disorder or condition relating to any part of the respiratory system, such as the lungs, alveoli, trachea, bronchi, nasal passages, or nose. Exemplary respiratory diseases, disorders, or conditions include asthma, allergies, bronchitis, allergic rhinitis, chronic obstructive pulmonary disease (COPD), lung cancer, oxygen toxicity, emphysema, chronic bronchitis, and acute respiratory distress syndrome. All types of respiratory diseases, disorders, or conditions disclosed herein or known in the art are contemplated as being within the scope of the disclosure.

[0185] In certain embodiments, the non-proliferative disease is a renal disease. In certain embodiments, the compound of Formula (I) or a pharmaceutically acceptable salt thereof, or compositions comprising such compound or pharmaceutically acceptable salt thereof, is used to prevent or treat a renal disease, disorder, or condition. A renal disease, disorder, or condition can include a disease, disorder, or condition relating to any part of the waste production, storage, and removal system, including the kidneys, ureter, bladder, urethra, adrenal gland, and pelvis. Exemplary renal diseases include acute kidney failure, amyloidosis, Alport syndrome, adenovirus nephritis, acute lobar nephronia, tubular necrosis, glomerulonephritis, kidney stones, urinary tract infections, chronic kidney disease, polycystic kidney disease, and focal segmental glomerulosclerosis (FSGS). In some embodiments, the renal disease, disorder, or condition comprises HIV-associated nephropathy or hypertensive nephropathy. All types of renal diseases, disorders, or conditions disclosed herein or known in the art are contemplated as being within the scope of the disclosure.

[0186] In certain embodiments, the non-proliferative disease is an infectious disease. In certain embodiments, the compound of Formula (I) or a pharmaceutically acceptable salt thereof, or compositions comprising such compound or pharmaceutically acceptable salt thereof, is used to prevent or treat an infectious disease, disorder, or condition. An infectious disease may be caused by a pathogen such as a virus or bacteria. Exemplary infectious diseases include human immunodeficiency syndrome (HIV), acquired immunodeficiency syndrome (AIDS), meningitis, African sleeping sickness, actinomycosis, pneumonia, botulism, chlamydia, Chagas disease, Colorado tick fever, cholera, typhus, giardiasis, food poisoning, ebola hemorrhagic fever, diphtheria, Dengue fever, gonorrhea, streptococcal infection (e.g., Group A or Group B), hepatitis A, hepatitis B, hepatitis C, herpes simplex, hookworm infection, influenza, Epstein-Barr infection, Kawasaki disease, kuru, leprosy, leishmaniasis, measles, mumps, norovirus, meningococcal disease, malaria, Lyme disease, listeriosis, rabies, rhinovirus, rubella, tetanus, shingles, scarlet fever, scabies, Zika fever, yellow fever, tuberculosis, toxoplasmosis, or tularemia. In some embodiments, the infectious disease comprises cytomegalovirus. All types of infectious diseases, disorders, or conditions disclosed herein or known in the art are contemplated as being within the scope of the disclosure.

[0187] In certain embodiments, the disease, disorder, or condition is a haploinsufficiency disease. In certain embodiments, the compound of Formula (I) or a pharmaceutically acceptable salt thereof, or compositions comprising such compound or pharmaceutically acceptable salt thereof, is used to prevent or treat a haploinsufficiency disease, disorder, or condition. A haploinsufficiency disease, disorder, or condition may refer to a monogenic disease in which an allele of a gene has a loss-of-function lesion, e.g., a total loss of function lesion. In an embodiment, the loss-of-function lesion is present in an autosomal dominant inheritance pattern or is derived from a sporadic event. In an embodiment, the reduction of gene product function due to the altered allele drives the disease phenotype despite the remaining functional allele (i.e. said disease is haploinsufficient with regard to the gene in question). In an embodiment, a compound of Formula (I) increases expression of the haploinsufficient gene locus. In an embodiment, a compound of Formula (I) increases one or both alleles at the haploinsufficient gene locus. Exemplary haploinsufficiency diseases, disorders, and conditions include Robinow syndrome, cardiomyopathy, cerebellar ataxia, pheochromocytoma, Charcot-Marie-Tooth disease, neuropathy, Takenouchi-Kosaki syndrome, Coffin-Siris syndrome 2, chromosome 1p35 deletion syndrome, spinocerebellar ataxia 47, deafness, seizures, dystonia 9, GLUT1 deficiency syndrome 1, GLUT1 deficiency syndrome 2, stomatin-deficient cryohydrocytosis, basal cell carcinoma, basal cell nevus syndrome, medulloblastoma, somatic, brain malformations, macular degeneration, cone-rod dystrophy, Dejerine-Sottas disease, hypomyelinating neuropathy, Roussy-Levy syndrome, glaucoma, autoimmune lymphoproliferative syndrome, pituitary hormone deficiency, epileptic encephalopathy, early infantile, popliteal pterygium syndrome, van der Woude syndrome, Loeys-Dietz syndrome, Skraban-Deardorff syndrome, erythrocytosis, megalencephaly-polymicrogyria-polydactyly-hydrocephalus syndrome, mental retardation, CINCA syndrome, familial cold inflammatory syndrome 1, keratoendothelitis fugax hereditaria, Muckle-Wells syndrome, Feingold syndrome 1, Acute myeloid leukemia, Heyn-Sproul-Jackson syndrome, Tatton-Brown-Rahman syndrome, Shashi-Pena syndrome, Spastic paraplegia, autosomal dominant, macrophthalmia, colobomatous, with microcornea, holoprosencephaly, schizencephaly, endometrial cancer, familial, colorectal cancer, hereditary nonpolyposis, intellectual developmental disorder with dysmorphic facies and behavioral abnormalities, ovarian hyperstimulation syndrome, schizophrenia, Dias-Logan syndrome, premature ovarian failure, dystonia, dopa-responsive, due to sepiapterin reductase deficiency, Beck-Fahrner syndrome, chromosome 2p12-p11.2 deletion syndrome, neuronopathy, spastic paraplegia, familial adult myoclonic, colorectal cancer, hypothyroidism, Culler-Jones syndrome, holoprosencephaly, myelokathexis, WHIM syndrome, Mowat-Wilson syndrome, mental retardation, an intellectual developmental disorder, autism spectrum disorder, epilepsy, epileptic encephalopathy, Dravet syndrome, migraines, a mental retardation disorder (e.g., a disorder caused by a SETD5 gene mutation, e.g., intellectual disability-facial dysmorphism syndrome, autism spectrum disorder), a disorder caused by a GATA2 mutation (e.g., GATA2 deficiency; GATA2 haploinsufficiency; Emberger syndrome; monocytopenia and Mycobacterium avium complex/dendritic cell, monocyte, B and NK lymphocyte deficiency; familial myelodysplastic syndrome; acute myeloid leukemia; chronic myelomonocytic leukemia), and febrile seizures.

[0188] In certain embodiments, the disease, disorder, or condition is an autosomal recessive disease, e.g., with residual function. In certain embodiments, the compound of Formula (I), or a pharmaceutically acceptable salt thereof, or compositions comprising such compound or pharmaceutically acceptable salt thereof, is used to prevent or treat an autosomal recessive disease, disorder, or condition. An autosomal recessive disease with residual function may refer to a monogenic disease with either homozygous recessive or compound heterozygous heritability. These diseases may also be characterized by insufficient gene product activity (e.g., a level of gene product greater than 0%). In an embodiment, a compound of Formula (I) may increase the expression of a target (e.g., a gene) related to an autosomal recessive disease with residual function. Exemplary autosomal recessive diseases with residual function include Friedreich's ataxia, Stargardt disease, Usher syndrome, chlorioderma, fragile X syndrome, achromatopsia 3, Hurler syndrome, hemophilia B, alpha-1-antitrypsin deficiency, Gaucher disease, X-linked retinoschisis, Wiskott-Aldrich syndrome, mucopolysaccharidosis (Sanfilippo B), DDC deficiency, epidermolysis bullosa dystrophica, Fabry disease, metachromatic leukodystrophy, and odontochondrodysplasia.

[0189] In certain embodiments, the disease, disorder, or condition is an autosomal dominant disease. In certain embodiments, the compound of Formula (I), or a pharmaceutically acceptable salt thereof, or compositions comprising such compound or pharmaceutically acceptable salt thereof, is used to prevent or treat an autosomal dominant disease, disorder, or condition. An autosomal dominant disease may refer to a monogenic disease in which the mutated gene is a dominant gene. These diseases may also be characterized by insufficient gene product activity (e.g., a level of gene product greater than 0%). In an embodiment, a compound of Formula (I) may increase the expression of a target (e.g., a gene) related to an autosomal dominant disease. Exemplary autosomal dominant diseases include Huntington's disease, achondroplasia, antithrombin III deficiency, Gilbert's disease, Ehlers-Danlos syndrome, hereditary hemorrhagic telangiectasia, intestinal polyposis, hereditary elliptosis, hereditary spherocytosis, marble bone disease, Marfan's syndrome, protein C deficiency, Treacher Collins syndrome, Von Willebrand's disease, tuberous sclerosis, osteogenesis imperfecta, polycystic kidney disease, neurofibromatosis, and idiopathic hypoparathyroidism.

[0190] In certain embodiments, the disease, disorder, or condition is a paralogue activation disorder. In certain embodiments, the compound of Formula (I), or a pharmaceutically acceptable salt thereof, or compositions comprising such compound or pharmaceutically acceptable salt thereof, is used to prevent or treat a paralogue activation disease, disorder, or condition. A paralogue activation disorder may comprise a homozygous mutation of genetic locus leading to loss-of-function for the gene product. In these disorders, there may exist a separate genetic locus encoding a protein with overlapping function (e.g. developmental paralogue), which is otherwise not expressed sufficiently to compensate for the mutated gene. In an embodiment, a compound of Formula (I) activates a gene connected with a paralogue activation disorder (e.g., a paralogue gene).

[0191] The cell described herein may be an abnormal cell. The cell may be in vitro or in vivo. In certain embodiments, the cell is a proliferative cell. In certain embodiments, the cell is a cancer cell. In certain embodiments, the cell is a non-proliferative cell. In certain embodiments, the cell is a blood cell. In certain embodiments, the cell is a lymphocyte. In certain embodiments, the cell is a benign neoplastic cell. In certain embodiments, the cell is an endothelial cell. In certain embodiments, the cell is an immune cell. In certain embodiments, the cell is a neuronal cell. In certain embodiments, the cell is a glial cell. In certain embodiments, the cell is a brain cell. In certain embodiments, the cell is a fibroblast. In certain embodiment, the cell is a primary cell, e.g., a cell isolated from a subject (e.g., a human subject).

[0192] In some embodiments, a compound of Formula (I) or a pharmaceutically acceptable salt thereof, e.g., as described herein, has improved cell permeability over a reference compound, e.g., in a standard assay for measuring cell permeability. Cell permeability may be investigated, for example, using a standard assay run in either Madin-Darby Canine Kidney (MDCK) cells expressing Breast Cancer Resistance Protein (BCRP) or subclone MDCKII cells expressing Multidrug Resistance Protein 1 (MDR1); see, e.g., Drug Metabolism and Disposition 36, 268-275 (2008) and Journal of Pharmaceutical Sciences 107 2225-2235 (2018). In an embodiment, a compound of Formula (I) or a pharmaceutically acceptable salt thereof, e.g., as described herein, has a cell permeability measurement (Papp) of <2×10⁻⁶ cm s⁻¹. In an embodiment, a compound of Formula (I) or a pharmaceutically acceptable salt thereof, e.g., as described herein, has a cell permeability measurement (Papp) of between 2-6×10⁻⁶ cm s⁻¹. In an embodiment, a compound of Formula (I) or a pharmaceutically acceptable salt thereof, e.g., as described herein, has a cell permeability measurement (Papp) of Papp greater than 6×10⁻⁶ cm s⁻¹. In an embodiment, a compound of Formula (I) or a pharmaceutically acceptable salt thereof, e.g., as described herein, has a cell permeability greater than 1%, 5%, 10%, 15%, 20%, 25%, 30%, 35%, 40%, 45%, 50%, 55%, 60%, 65%, 70%, 75%, 80%, 85%, 90%, 95%, 99% or more, e.g., compared with a reference compound.

[0193] In some embodiments, a compound of Formula (I) or a pharmaceutically acceptable salt thereof, e.g., as described herein, exhibits decreased cell efflux, e.g., over a reference compound, e.g., in a standard assay for measuring cell efflux. Cell efflux may be investigated, for example, using a standard assay run in either Madin-Darby Canine Kidney (MDCK) cells expressing Breast Cancer Resistance Protein (BCRP) or subclone MDCKII cells expressing Multidrug Resistance Protein 1 (MDR1); see, e.g., Drug Metabolism and Disposition 36, 268-275 (2008) and Journal of Pharmaceutical Sciences 107 2225-2235 (2018). In an embodiment, a compound of Formula (I) or a pharmaceutically acceptable salt thereof, e.g., as described herein, has a cell efflux ratio of less than 1.5. In an embodiment, a compound of Formula (I) or a pharmaceutically acceptable salt thereof, e.g., as described herein, has a cell efflux ratio of between 1.5 and 5. In an embodiment, a compound of Formula (I) or a pharmaceutically acceptable salt thereof, e.g., as described herein, has a cell efflux ratio greater than 5. In an embodiment, a compound of Formula (I) or a pharmaceutically acceptable salt thereof, e.g., as described herein, has a cell efflux ratio less than 1%, 5%, 10%, 15%, 20%, 25%, 30%, 35%, 40%, 45%, 50%, 55%, 60%, 65%, 70%, 75%, 80%, 85%, 90%, 95%, 99% or more, e.g., compared with a reference compound.

[0194] In some embodiments, a compound of Formula (I) or a pharmaceutically acceptable salt thereof, e.g., as described herein, modulates the expression of a target protein (e.g., HTT or MYB) in a reference cell or sample. In an embodiment, a compound of Formula (I) or a pharmaceutically acceptable salt thereof, e.g., as described herein, increases the expression of a target protein (e.g., HTT or MYB) in a reference cell or sample. In an embodiment, a compound of Formula (I) or a pharmaceutically acceptable salt thereof, e.g., as described herein, decreases the expression of a target protein (e.g., HTT or MYB) in a reference cell or sample. The effect of an exemplary compound of Formula (I) on protein abundance may be measured using a standard assay for measuring protein abundance, such as the HiBit-assay system (Promega). In this assay, percent response for each respective cell line may be as calculated at each compound concentration as follows: % response=100*(S−PC)/(NC−PC). For the normalized response at each concentration, a four-parameter logistical regression may be fit to the data and the response may be interpolated at the 50% value to determine a concentration for protein abundance at 50% (IC₅₀) an untreated control. In an embodiment, a compound of Formula (I) or a pharmaceutically acceptable salt thereof, e.g., as described herein, has a protein abundance response less than 100 nM. In an embodiment, a compound of Formula (I) or a pharmaceutically acceptable salt thereof, e.g., as described herein, has a protein abundance response between 100-1000 nM. In an embodiment, a compound of Formula (I) or a pharmaceutically acceptable salt thereof, e.g., as described herein, has a protein abundance response greater than 1000 nM. In an embodiment, a compound of Formula (I) or a pharmaceutically acceptable salt thereof, e.g., as described herein, has a protein abundance response greater than 10 uM. In an embodiment, a compound of Formula (I) or a pharmaceutically acceptable salt thereof, e.g., as described herein, modulates the protein abundance of a target protein by about 1%, 5%, 10%, 15%, 20%, 25%, 30%, 35%, 40%, 45%, 50%, 55%, 60%, 65%, 70%, 75%, 80%, 85%, 90%, 95%, 99% or more, e.g., compared with a reference compound.

[0195] In some embodiments, a compound of Formula (I) or a pharmaceutically acceptable salt thereof, e.g., as described herein, modulates the viability of a target cell in a subject or sample. In an embodiment, a compound of Formula (I) or a pharmaceutically acceptable salt thereof, e.g., as described herein, increases the viability of a target cell in a subject or sample. In an embodiment, a compound of Formula (I) or a pharmaceutically acceptable salt thereof, e.g., as described herein, decreases the viability of a target cell in a subject or sample. In an embodiment, a compound of Formula (I) or a pharmaceutically acceptable salt thereof, e.g., as described herein, does not impact the viability of a cell (e.g., is non-toxic) in a subject or sample. The effect an exemplary compound of Formula (I) on cell viability may be measured using a standard assay for measuring cell toxicity, such as the Cell Titer Glo 2.0 assay in either K562 (human chronic myelogenous leukemia) or SH-SY5Y (human neuroblastoma) cells. The concentration at which cell viability is measured may be based on the particular assay used. In an embodiment, a compound of Formula (I) or a pharmaceutically acceptable salt thereof, e.g., as described herein, is tolerated by a target cell at a concentration of less than 100 nM. In an embodiment, a compound of Formula (I) or a pharmaceutically acceptable salt thereof, e.g., as described herein, is tolerated by a target cell at a concentration of between 100-1000 nM. In an embodiment, a compound of Formula (I) or a pharmaceutically acceptable salt thereof, e.g., as described herein, is tolerated by a target cell at a concentration of greater than 1000 nM. In an embodiment, a compound of Formula (I) or a pharmaceutically acceptable salt thereof, e.g., as described herein, is tolerated by a target cell at a concentration of greater than 10 uM.

[0196] In some embodiments, a compound of Formula (I) or a pharmaceutically acceptable salt thereof, e.g., as described herein, has improved brain permeability over a reference compound, e.g., in a standard assay for measuring brain permeability. Brain permeability may be measured, for example, by determining the unbound partition coefficient (Kpuu), brain. In such an assay, the unbound brain partition coefficient (K_{p,uu,brain}) may be defined as the ratio of unbound brain-free compound concentration to unbound plasma concentration. It is calculated using the following equation:

$${K}_{p , uu , brain} = \frac{{f}_{u , brain} \times {C}_{brain}}{{f}_{u , plasma} \times {C}_{plasma}}$$

C_{brain} and Cₚₗₐₛₘₐ represent the total concentrations in brain and plasma, respectively. In this assay, the f_{u,brain} and f_{u,plasma} may be the unbound fraction of the compound in brain and plasma, respectively. Both f_{u,brain} and f_{u,plasma} may be determined in vitro via equilibrium dialysis. In an embodiment, a compound of Formula (I) or a pharmaceutically acceptable salt thereof, e.g., as described herein, has a Kp value of greater than 5. In an embodiment, a compound of Formula (I) or a pharmaceutically acceptable salt thereof, e.g., as described herein, has a Kp value between 1 and 5. In an embodiment, a compound of Formula (I) or a pharmaceutically acceptable salt thereof, e.g., as described herein, has a Kp value between 0.2-1. In an embodiment, a compound of Formula (I) or a pharmaceutically acceptable salt thereof, e.g., as described herein, has a Kp value of less than 0.2. In an embodiment, a compound of Formula (I) or a pharmaceutically acceptable salt thereof, e.g., as described herein, has a Kpuu value of greater than 2.5. In an embodiment, a compound of Formula (I) or a pharmaceutically acceptable salt thereof, e.g., as described herein, has a Kpuu value between 0.5-2.5. In an embodiment, a compound of Formula (I) or a pharmaceutically acceptable salt thereof, e.g., as described herein, has a Kpuu value between 0.1-0.5. In an embodiment, a compound of Formula (I) or a pharmaceutically acceptable salt thereof, e.g., as described herein, has a Kpuu value of less than 0.1. In an embodiment, a compound of Formula (I) or a pharmaceutically acceptable salt thereof, e.g., as described herein, has a brain permeability greater than 1%, 5%, 10%, 15%, 20%, 25%, 30%, 35%, 40%, 45%, 50%, 55%, 60%, 65%, 70%, 75%, 80%, 85%, 90%, 95%, 99% or more, e.g., compared with a reference compound.

[0197] In some embodiments, a compound of Formula (I) or a pharmaceutically acceptable salt thereof, e.g., as described herein, exhibits selectivity for one target nucleic acid sequence, e.g., pre-mRNA transcript sequence or bulge, compared to another target nucleic acid sequence, e.g., pre-mRNA transcript sequence or bulge. In an embodiment, a compound of Formula (I) or a pharmaceutically acceptable salt thereof, e.g., as described herein, exhibits selectivity for HTT, e.g., an HTT-related nucleic acid sequence. In an embodiment, a compound of Formula (I) or a pharmaceutically acceptable salt thereof, e.g., as described herein, exhibits selectivity for SMN2, e.g., an SMN2-related nucleic acid sequence. In an embodiment, a compound of Formula (I) or a pharmaceutically acceptable salt thereof, e.g., as described herein, exhibits selectivity for Target C, e.g., a Target C-related nucleic acid sequence. In an embodiment, a compound of Formula (I) or a pharmaceutically acceptable salt thereof, e.g., as described herein, exhibits selectivity for MYB, e.g., a MYB-related nucleic acid sequence. Selectivity for one target nucleic acid sequence over another may be measured using any number of methods known in the art. In an embodiment, selectivity may be measured by determining the ratio of derived qPCR values (e.g., as described herein) for one target nucleic acid sequence over another. In an embodiment, a compound of Formula (I) or a pharmaceutically acceptable salt thereof, e.g., as described herein, has a ratio of greater than 1.1, 1.5, 2, 3, 4, 5, 6, 7, 8, 9, 10, 15, 20, 25, 30, 35, 40, 45, 50, 75, or 100 selectivity for one target nucleic acid sequence over another. In an embodiment, a compound of Formula (I) or a pharmaceutically acceptable salt thereof, e.g., as described herein, has a ratio of greater than 1.1, 1.5, 2, 3, 4, 5, 6, 7, 8, 9, 10, 15, 20, 25, 30, 35, 40, 45, 50, 75, or 100 selectivity for HTT over another target nucleic acid sequence. In an embodiment, a compound of Formula (I) or a pharmaceutically acceptable salt thereof, e.g., as described herein, has a ratio of greater than 1.1, 1.5, 2, 3, 4, 5, 6, 7, 8, 9, 10, 15, 20, 25, 30, 35, 40, 45, 50, 75, or 100 selectivity for SMN2 over another. In an embodiment, a compound of Formula (I) or a pharmaceutically acceptable salt thereof, e.g., as described herein, has a ratio of greater than 1.1, 1.5, 2, 3, 4, 5, 6, 7, 8, 9, 10, 15, 20, 25, 30, 35, 40, 45, 50, 75, or 100 selectivity for MYB over another target nucleic acid sequence. In an embodiment, a compound of Formula (I) or a pharmaceutically acceptable salt thereof, e.g., as described herein, has a ratio of greater than 1.1, 1.5, 2, 3, 4, 5, 6, 7, 8, 9, 10, 15, 20, 25, 30, 35, 40, 45, 50, 75, or 100 selectivity for Target C sequence over another. In an embodiment, a compound of Formula (I) or a pharmaceutically acceptable salt thereof, e.g., as described herein, has a ratio of greater than 1.1, 1.5, 2, 3, 4, 5, 6, 7, 8, 9, 10, 15, 20, 25, 30, 35, 40, 45, 50, 75, or 100 selectivity for HTT over MYB. In an embodiment, a compound of Formula (I) or a pharmaceutically acceptable salt thereof, e.g., as described herein, has a ratio of greater than 1.1, 1.5, 2, 3, 4, 5, 6, 7, 8, 9, 10, 15, 20, 25, 30, 35, 40, 45, 50, 75, or 100 selectivity for MYB over HTT. In an embodiment, a compound of Formula (I) or a pharmaceutically acceptable salt thereof, e.g., as described herein, has a ratio of greater than 1.1, 1.5, 2, 3, 4, 5, 6, 7, 8, 9, 10, 15, 20, 25, 30, 35, 40, 45, 50, 75, or 100 selectivity for HTT over SMN2. In an embodiment, a compound of Formula (I) or a pharmaceutically acceptable salt thereof, e.g., as described herein, has a ratio of greater than 1.1, 1.5, 2, 3, 4, 5, 6, 7, 8, 9, 10, 15, 20, 25, 30, 35, 40, 45, 50, 75, or 100 selectivity for SMN2 over HTT. In an embodiment, a compound of Formula (I) or a pharmaceutically acceptable salt thereof, e.g., as described herein, has a ratio of greater than 1.1, 1.5, 2, 3, 4, 5, 6, 7, 8, 9, 10, 15, 20, 25, 30, 35, 40, 45, 50, 75, or 100 selectivity for SMN2 over MYB. In an embodiment, a compound of Formula (I) or a pharmaceutically acceptable salt thereof, e.g., as described herein, has a ratio of greater than 1.1, 1.5, 2, 3, 4, 5, 6, 7, 8, 9, 10, 15, 20, 25, 30, 35, 40, 45, 50, 75, or 100 selectivity for MYB over SMN2. In an embodiment, a compound of Formula (I) or a pharmaceutically acceptable salt thereof, e.g., as described herein, has a 3-fold greater selectivity for HTT over MYB. In an embodiment, a compound of Formula (I) or a pharmaceutically acceptable salt thereof, e.g., as described herein, has a 3-fold greater selectivity for MYB over HTT. In an embodiment, a compound of Formula (I) or a pharmaceutically acceptable salt thereof, e.g., as described herein, has a 10-fold greater selectivity for HTT over MYB. In an embodiment, a compound of Formula (I) or a pharmaceutically acceptable salt thereof, e.g., as described herein, has a 10-fold greater selectivity for MYB over HTT. In an embodiment, a compound of Formula (I) or a pharmaceutically acceptable salt thereof, e.g., as described herein, has a 3-fold greater selectivity for HTT over SMN2. In an embodiment, a compound of Formula (I) or a pharmaceutically acceptable salt thereof, e.g., as described herein, has a 3-fold greater selectivity for SMN2 over HTT. In an embodiment, a compound of Formula (I) or a pharmaceutically acceptable salt thereof, e.g., as described herein, has a 10-fold greater selectivity for HTT over SMN2. In an embodiment, a compound of Formula (I) or a pharmaceutically acceptable salt thereof, e.g., as described herein, has a 10-fold greater selectivity for SMN2 over HTT. In an embodiment, a compound of Formula (I) or a pharmaceutically acceptable salt thereof, e.g., as described herein, has a 3-fold greater selectivity for MYB over SMN2. In an embodiment, a compound of Formula (I) or a pharmaceutically acceptable salt thereof, e.g., as described herein, has a 3-fold greater selectivity for SMN2 over MYB. In an embodiment, a compound of Formula (I) or a pharmaceutically acceptable salt thereof, e.g., as described herein, has a 10-fold greater selectivity for MYB over SMN2. In an embodiment, a compound of Formula (I) or a pharmaceutically acceptable salt thereof, e.g., as described herein, has a 10-fold greater selectivity for SMN2 over MYB. In an embodiment, a compound of Formula (I) or a pharmaceutically acceptable salt thereof, e.g., as described herein, has a selectivity for one target nucleic acid sequence that is greater than 1%, 5%, 10%, 15%, 20%, 25%, 30%, 35%, 40%, 45%, 50%, 55%, 60%, 65%, 70%, 75%, 80%, 85%, 90%, 95%, 99% or more, e.g., compared with a second nucleic acid sequence.

[0198] In certain embodiments, the methods described herein comprise the additional step of administering one or more additional pharmaceutical agents in combination with the compound of Formula (I), a pharmaceutically acceptable salt thereof, or compositions comprising such compound or pharmaceutically acceptable salt thereof. Such additional pharmaceutical agents include, but are not limited to, anti-proliferative agents, anti-cancer agents, anti-diabetic agents, anti-inflammatory agents, immunosuppressant agents, and a pain-relieving agent. The additional pharmaceutical agent(s) may synergistically augment the modulation of splicing induced by the inventive compounds or compositions of this disclosure in the biological sample or subject.

[0199] Thus, the combination of the inventive compounds or compositions and the additional pharmaceutical agent(s) may be useful in treating, for example, a cancer or other disease, disorder, or condition resistant to a treatment using the additional pharmaceutical agent(s) without the inventive compounds or compositions.

### General Synthetic Scheme

[0200] Compounds of the present disclosure may be prepared using a synthetic protocol illustrated in the exemplary scheme shown below.

[chemical structure]

Scheme A. An exemplary method of preparing a compound of Formula (I); wherein A, B, X, and Y are as defined herein; and LG¹, LG², and LG³ are each independently hydrogen or a leaving group (e.g., halo, —B(OR¹²)₂).

[0201] An exemplary method of preparing a compound described herein, e.g., a compound of Formula (I-I) is provided in Scheme A. In Step 1, B-3 is prepared by incubating B-1 with B-2 in the presence of a base (e.g., Cs₂CO₃, DIEA, N-methylimidazole, or a suitable alternative). The reaction may be conducted in dimethylformamide or a similar solvent, at a temperature sufficient to provide B-3.

[0202] B-3 and B-4 are coupled to provide a compound of Formula (I-I) in Step 2. This coupling reaction may be conducted in the presence of a catalyst, such as a ruthenium, palladium, or copper catalyst (e.g., Pd-PEPPSI-IPentCl 2-methylpyridine, Pd(dppf)Cl₂, Pd₂(dba)₃, XPhos-Pd(II)-G2, XPhos-Pd(II)-G3, ^{t}BuBrettphos-Pd(II)-G3, RuPhos-Pd(II), RuPhos-Pd(II)-G2, RuPhos-Pd(II)-G3, or CuI, or similar reagent), and a base (e.g., Cs₂CO₃, K₂CO₃, BuONa, or a similar reagent). The reaction may be conducted in dimethylformamide or a similar solvent, at 100° C. or a temperature sufficient to provide the compound of Formula (I-I). Each starting material and/or intermediate in Scheme A may be protected and deprotected using standard protecting group methods. In addition, purification and characterization of each intermediate as well as the final compound of Formula (I) may be afforded by any accepted procedure.

### EXAMPLES

[0203] In order that the invention described herein may be more fully understood, the following examples are set forth. The examples described in this application are offered to illustrate the compounds, pharmaceutical compositions, and methods provided herein and are not to be construed in any way as limiting their scope.

[0204] The compounds provided herein can be prepared from readily available starting materials using modifications to the specific synthesis protocols set forth below that would be well known to those of skill in the art. It will be appreciated that where typical or preferred process conditions (i.e., reaction temperatures, times, mole ratios of reactants, solvents, pressures, etc.) are given, other process conditions can also be used unless otherwise stated. Optimum reaction conditions may vary with the particular reactants or solvents used, but such conditions can be determined by those skilled in the art by routine optimization procedures.

[0205] Additionally, as will be apparent to those skilled in the art, conventional protecting groups may be necessary to prevent certain functional groups from undergoing undesired reactions. The choice of a suitable protecting group for a particular functional group as well as suitable conditions for protection and deprotection are well known in the art. For example, numerous protecting groups, and their introduction and removal, are described in Greene et al., Protecting Groups in Organic Synthesis, Second Edition, Wiley, New York, 1991, and references cited therein.

[0206] Reactions can be purified or analyzed according to any suitable method known in the art. For example, product formation can be monitored by spectroscopic means, such as nuclear magnetic resonance (NMR) spectroscopy (e.g., ¹H or ¹³C), infrared (IR) spectroscopy, spectrophotometry (e.g., UV-visible), mass spectrometry (MS), or by chromatographic methods such as high performance liquid chromatography (HPLC) or thin layer chromatography (TLC).

[0207] Proton NMR: ¹H NMR spectra were recorded in CDCl₃ solution in 5-mm o.d. tubes (Wildmad) at 24° C. and were collected on a BRUKER AVANCE NEO 400 at 400 MHz for ¹H. The chemical shifts (δ) are reported relative to tetramethylsilane (TMS=0.00 ppm) and expressed in ppm.

[0208] LC/MS: Liquid chromatography-mass spectrometry (LC/MS) was performed on Shimadzu-2020EV using column: Shim-pack XR-ODS (C18, Ø4.6×50 mm, 3 μm, 120 Å, 40° C.) operating in ESI(+) ionization mode; flow rate=1.2 mL/min. Mobile phase=0.05% TFA in water or CH₃CN; or on Shimadzu-2020EV using column: Poroshell HPH-C18 (C18, Ø4.6×50 mm, 3 μm, 120 Å, 40° C.) operating in ESI(+) ionization mode; flow rate=1.2 mL/min. Mobile phase A: Water/5 mM NH₄HCO₃, Mobile phase B: CH₃CN.)

[0209] Analytical chiral HPLC: Analytical chiral HPLC was performed on a Agilent 1260 using column: CHLRALPAK IG-3, CHIRALPAK IC-3 or CHIRALPAK OJ-3, with flow rate=1.2 mL/min. Mobile phase=MTBE(DEA):EtOH=:50:50).

[0210] Preparative HPLC purification: prep-HPLC purification was performed using one of the following HPLC conditions:
[0211] Condition 1: Column: Xselect CSH OBD Column 30*150 mm 5 um; Mobile Phase A: water (10 mmol/L NH₄HCO₃); Mobile Phase B: acetonitrile; Flow rate: 60 mL/min; Gradient 1: 5 B to 45 B in 6 min; Gradient 2: 5 B to 40 B in 8 min; Gradient 3: 10 B to 50 B in 10 min; Gradient 4: 3 B to 33 B in 8 min.
[0212] Condition 2: Column: X-Bridge Prep OBD C18, 30-150 mm 5 um; Mobile phase A: water (10 mmol/L NH₄HCO₃); Mobile phase B: acetonitrile; Gradient 1: 5% Phase B up to 55% in 8 min; Gradient 2: 10% B to 43% B in 8 min; Gradient 3: 10% B to 50% B in 8 min; Gradient 4: 20% B to 52% B in 8 min; Gradient 5: 5% B to 45% B in 8 min; Gradient 6: 10% B to 30% B in 10 min; Gradient 7: 30% B to 70% B in 8 min.
[0213] Condition 3: Column: Waters Xbridge BEH C18 250*50 mm*10 um; Mobile Phase A: Water (NH₄HCO₃) Mobile Phase B: Acetonitrile; Gradient 1: 70% B-90% B in 10 min; Gradient 2: 50% B to 70% B in 8 min.
[0214] Condition 4: Column: Phenomenex C18 75*30 mm*3 um; Mobile Phase A: Water (NH₄HCO₃) Mobile Phase B: Acetonitrile; Gradient 1: 35% B-65% B in 8 min; Gradient 2: 60% B to 90% B in 8 min; Gradient 3: 1% B to 40% B in 7 min

[0215] Preparative chiral HPLC: purification by chiral HPLC was performed on a Gilson-GX 281 using column: CHIRALPAK IG-3, CHIRALPAK IC-3 or CHIRALPAK OJ-3.
[0216] Condition 1: Column: IG 2 cm×25 cm; Mobile Phase A: methyl tert-butyl ether; Mobile Phase B: ethanol; Gradient 1:1; Flow rate: 18 mL/min.
[0217] Condition 2: Gilson 281 semi-preparative: Column: Phenomenex Luna 80×30 mm×3 μm; Mobile Phase A: Water (4.8 mmol/L HCl), Mobile Phase B: Acetonitrile; Gradient 1:1% B to 30% B in 8 min.
[0218] Condition 3: Column, Kinetex EVO C18 Column, 30×150, 5 um; Mobile Phase A: Water (10 mmol/L NH₄HCO₃), Mobile Phase B: Acetonitrile; Gradient 1: 20% B to 55% B in 8 min.

### Example 1: Synthesis of Compound 100

### Synthesis of Intermediate B3

[chemical structure]

[0219] To a stirred solution of 5-bromo-7-fluoro-2H-indazole (B1, 500 mg, 2.32 mmol, 1 equiv) and tert-butyl 4-(methanesulfonyloxy) piperidine-1-carboxylate (B2, 974.36 mg, 3.48 mmol, 1.5 equiv) in DMF (10 mL) was added K₂CO₃ (964.11 mg, 6.97 mmol, 3 equiv) dropwise at room temperature under nitrogen atmosphere. The resulting mixture was stirred overnight at 100° C., and the reaction was quenched with water at room temperature. The resulting mixture was extracted with EtOAc (2×30 mL), then the combined organic layers were washed with brine (2×50 mL), dried over anhydrous Na₂SO₄, filtered, and concentrated under reduced pressure to afford tert-butyl 4-(5-bromo-7-fluoroindazol-2-yl) piperidine-1-carboxylate (B3, 800 mg, 86%) as a solid.

### Synthesis of Intermediate B5

[chemical structure]

[0220] To a stirred solution of tert-butyl 4-(5-bromo-7-fluoroindazol-2-yl) piperidine-1-carboxylate (B3, 700 mg, 1.75 mmol, 1 equiv) and 7-fluoro-2-methyl-5-(4,4,5,5-tetramethyl-1,3,2-dioxaborolan-2-yl) indazole (B4, 727.95 mg, 2.63 mmol, 1.5 equiv) in dioxane (7 mL) were added Pd(dppf)Cl₂CH₂Cl₂ (143.18 mg, 0.17 mmol, 0.1 equiv) and K₃PO₄ (1119.22 mg, 5.27 mmol, 3 equiv) and H₂O (2 mL) dropwise at room temperature under nitrogen atmosphere. The resulting mixture was stirred overnight at 80° C. After filtration, the filtrate was concentrated under reduced pressure and the residue was purified by silica gel column chromatography, eluted with CH₂Cl₂/MeOH (10:1) to afford tert-butyl 4-{7,7 [symbol] difluoro-2 [symbol] methyl-[5,5 [symbol] biindazol]-2-yl}piperidine-1-carboxylate (B5, 500 mg, 60%) as a solid.

### Synthesis of Compound 100

[chemical structure]

[0221] To a stirred solution of tert-butyl 4-{7,7 [symbol] difluoro-2 [symbol] methyl-[5,5 [symbol] biindazol]-2-yl}piperidine-1-carboxylate (B5, 500 mg, 1.06 mmol, 1 equiv) in MeOH (5 mL) was added HCl (gas) in 1,4-dioxane (5 mL) dropwise at room temperature under nitrogen atmosphere. The resulting mixture was stirred for 1 h at room temperature, and the resulting mixture was concentrated under reduced pressure. The crude product was purified by Chiral-Prep-HPLC (Condition 1, Gradient 1) to afford 7 [symbol] difluoro-2 [symbol] methyl-1-(piperidin-4-yl)-5,5 [symbol] biindazole (Compound 100, 19.6 mg, 4%) as a solid. LCMS: (ES, m/z): 368 [M+H]⁺. ¹H NMR (400 MHz, Chloroform-d) δ 8.07 (d, J=2.7 Hz, 1H), 7.99 (d, J=2.6 Hz, 1H), 7.61 (dd, J=8.1, 1.4 Hz, 2H), 7.29 (m, 1H), 7.21 (m, 1H), 4.61 (tt, J=11.7, 4.0 Hz, 1H), 4.27 (s, 3H), 3.38-3.29 (m, 2H), 2.87 (td, J=12.6, 2.5 Hz, 2H), 2.38-2.29 (m, 2H), 2.15-2.04 (m, 2H).

### Example 2: Synthesis of Compound 103

### Synthesis of Intermediate B7

[chemical structure]

[0222] To a solution of 5-bromo-3-fluoro-benzene-1,2-diamine (B6, 5 g, 24.39 mmol, 1 equiv) in H₂O (50 mL) was added a solution of NaNO₂ (1.85 g, 26.83 mmol, 1.1 equiv) in H₂O (50 mL) at 15° C. The mixture was stirred at 15° C. for 15 min. Then AcOH (18.90 g, 314.73 mmol, 18 mL, 12.91 equiv) was added dropwise at 15° C. The resulting mixture was stirred at 85° C. for 1 hr. The reaction mixture was diluted with water (50 mL) and extracted with ethyl acetate (3×50 mL). The combined organic layers were washed with brine (3×50 mL), dried over Na₂SO₄, filtered and concentrated under reduced pressure to afford 6-bromo-4-fluoro-2H-benzotriazole (B7, 5 g, 94%) as a solid. LCMS: (ES, m/z): 215.9 [M+H]⁺. ¹H NMR (400 MHz, DMSO-d₆) δ ppm 8.01 (d, J=1.19 Hz, 1H) 7.52 (dd, J=10.01, 1.19 Hz, 1H).

### Synthesis of Intermediate B8

[chemical structure]

[0223] A mixture of 6-bromo-4-fluoro-2H-benzotriazole (B7, 200 mg, 925.88 umol, 1 equiv), tert-butyl 4-bromopiperidine-1-carboxylate (733.74 mg, 2.78 mmol, 3 equiv), Cs₂CO₃ (1.51 g, 4.63 mmol, 5 equiv) and KI (461.09 mg, 2.78 mmol, 3 equiv) in DMF (2 mL) was stirred at 100° C. for 12 hrs under nitrogen atmosphere. The reaction mixture was diluted with ethyl acetate (3 mL) and water (3 mL), extracted with ethyl acetate (3×3 mL). The combined organic layers were washed with brine (2×5 mL), dried over anhydrous Na₂SO₄, filtered, and concentrated under reduced pressure to give a residue. The residue was purified by silica gel column chromatography, eluted with petroleum ether/ethyl acetate (10: 1) to afford tert-butyl 4-(6-bromo-4-fluoro-benzotriazol-2-yl)piperidine-1-carboxylate (B8, 170 mg, 44%) as an oil. LCMS: (ES, m/z): 343 [M+H−56]⁺. ¹H NMR (400 MHz, Chloroform-d) δ ppm 7.85 (d, J=0.6 Hz, 1H), 7.18 (dd, J=9.4, 0.6 Hz, 1H), 4.93 (quin, J=7.6 Hz, 1H), 4.24 (d, J=8.8 Hz, 2H), 3.06 (d, J=7.0 Hz, 2H), 2.25-2.33 (m, 4H), 1.49 (s, 9H). ¹⁹F NMR (400 MHz, Chloroform-d) δ ppm −121.64.

### Synthesis of Intermediate B10

[chemical structure]

[0224] To a solution of 5-bromo-7-fluoro-2H-indazole (B9, 500 mg, 2.33 mmol, 1 equiv) in ethyl acetate (30 mL) was added Me₃OBF₄ (2.17 g, 14.65 mmol, 6.3 equiv). The mixture was stirred at 15° C. for 1 hr. The reaction mixture was diluted with water (20 mL) and extracted with ethyl acetate (3×50 mL). The combined organic layers were washed with brine (3×50 mL), dried over Na₂SO₄, filtered and concentrated under reduced pressure to give a residue. The residue was purified by column chromatography (SiO₂, Petroleum ether/Ethyl acetate=5/1 to 0/1) to obtain 5-bromo-7-fluoro-2-methyl-indazole (B10, 290 mg, 54%) as a solid. LCMS: (ES, m/z): 229[M+H]⁺. ¹H NMR (400 MHz, DMSO-d₆) δ ppm 8.47 (d, J=2.74 Hz, 1H) 7.83 (d, J=1.07 Hz, 1H) 7.25 (dd, J=10.97, 1.07 Hz, 1H) 4.20 (s, 3H)

### Synthesis of Intermediate B11

[chemical structure]

[0225] A mixture of 5-bromo-7-fluoro-2-methyl-indazole (B10, 30 mg, 130.98 umol, 1 equiv), 4,4,5,5-tetramethyl-2-(4,4,5,5-tetramethyl-1,3,2-dioxaborolan-2-yl)-1,3,2-dioxaborolane (49.89 mg, 196.46 umol, 1.5 equiv), KOAc (38.56 mg, 392.93 umol, 3 equiv), Pd(dppf)Cl₂ (9.58 mg, 13.10 umol, 0.1 equiv) in dioxane (0.5 mL) was stirred at 100° C. for 1 hr under nitrogen atmosphere. The reaction mixture was filtered through a pad of Celite and the filter cake was washed with dioxane (3×5 mL). The combined filtrates were concentrated to dryness to afford 7-fluoro-2-methyl-5-(4,4,5,5-tetramethyl-1,3,2-dioxaborolan-2-yl)indazole (B11, 60 mg, 91%) as a solid. LCMS: (ES, m/z): 277 [M+H]⁺.

### Synthesis of Intermediate B12

[chemical structure]

[0226] A mixture of 7-fluoro-2-methyl-5-(4,4,5,5-tetramethyl-1,3,2-dioxaborolan-2-yl)indazole (B11, 60 mg, 119.52 μmol), tert-butyl 4-(6-bromo-4-fluoro-benzotriazol-2-yl)piperidine-1-carboxylate (B8, 62.03 mg, 155.37 umol, 1.3 equiv), Pd(dppf)Cl₂ (8.75 mg, 11.95 umol, 0.1 equiv), K₂CO₃ (49.55 mg, 358.55 umol, 3 equiv) in dioxane (0.48 mL) and H₂O (0.12 mL) was stirred at 80° C. for 2 hr under nitrogen atmosphere. The reaction mixture was concentrated to give the crude product. The crude product was purified by silica gel column chromatography, eluted with petroleum ether/ethyl acetate (2:3) to afford tert-butyl 4-[4-fluoro-6-(7-fluoro-2-methyl-indazol-5-yl)benzotriazol-2-yl]piperidine-1-carboxylate (B12, 18 mg, 28%) as a solid. LCMS: (ES, m/z): 469 [M+H]⁺. ¹H NMR (400 MHz, Methanol-d₄) δ ppm 8.38 (d, J=2.6 Hz, 1H), 7.93 (d, J=1.1 Hz, 1H), 7.85 (d, J=1.1 Hz, 1H), 7.50 (dd, J=11.9, 1.04 Hz, 1H), 7.41 (dd, J=12.8, 1.2 Hz, 1H), 5.03-5.17 (m, 1H), 4.27 (s, 3H), 4.21 (d, J=13.8 Hz, 2H), 3.08-3.23 (m, 2H), 2.30-2.38 (m, 2H), 2.17-2.28 (m, 2H), 1.51 (s, 9H). ¹⁹F NMR (400 MHz, Methanol-d₄) δ ppm −130.90, 126.40.

### Synthesis of Compound 103

[chemical structure]

[0227] To a solution of tert-butyl 4-[4-fluoro-6-(7-fluoro-2-methyl-indazol-5-yl)benzotriazol-2-yl]piperidine-1-carboxylate (B12, 18 mg, 38.42 umol, 1 equiv) in ethyl acetate (1 mL) was added HCl (g)/ethyl acetate (4 M, 1 mL) at 15° C. The mixture was stirred at 15° C. for 0.75 hr. The reaction mixture was filtered and the filter cake was washed with ethyl acetate (3×3 mL). The filter cake was dried in vacuum to give 4-fluoro-6-(7-fluoro-2-methyl-indazol-5-yl)-2-(4-piperidyl) benzotriazole (Compound 103, 12.28 mg, 69%) as a solid. LCMS: (ES, m/z): 369 [M+H]⁺. ¹H NMR (400 MHz, Methanol-d₄) δ ppm 8.41 (d, J=2.7 Hz, 1H), 7.95 (d, J=1.0 Hz, 1H), 7.87 (d, J=1.0 Hz, 1H), 7.54 (dd, J=12.0, 0.8 Hz, 1H), 7.43 (dd, J=12.7, 1.1 Hz, 1H), 5.29 (tt, J=9.2, 4.7 Hz, 1H), 4.28 (s, 3H), 3.62 (dt, J=13.2, 4.2 Hz, 2H), 3.33-3.40 (m, 2H), 2.56-2.67 (m, 4H). ¹⁹F NMR (400 MHz, Methanol-d₄) δ ppm −130.78, 126.25.

### Example 3: Synthesis of Compound 109

### Synthesis of Intermediate B14

[chemical structure]

[0228] To a solution of 5-bromo-2,7-dimethyl-indazol-6-ol (B13, 1 g, 4.15 mmol, 1 equiv) in DMF (10 mL) was added NaH (497.70 mg, 6.22 mmol, 60%, 1.5 equiv) at 0° C. under N₂ atmosphere. The reaction mixture was stirred at 0° C. for 30 mins. To the reaction mixture was added MOMCl (1.34 g, 16.59 mmol, 1.26 mL, 4 equiv) at 0° C. under N₂ atmosphere. The reaction mixture was stirred at 25° C. for 1 hr. The mixture was quenched with saturated NaHCO₃ solution (30 mL), and extracted with ethyl acetate (3×30 mL). The combined organic phases were washed with brine (30 mL), dried over Na₂SO₄, filtered and the filtrate was concentrated to give crude product, which was purified by column chromatography on silica gel, eluted with petroleum ether/ethyl acetate (6:1) to give 5-bromo-6-(methoxymethoxy)-2,7-dimethyl-indazole (B14, 900 mg, 68%) as a solid. LCMS: (ES, m/z): 285 [M+H]⁺, ¹HNMR (400 MHz, DMSO-d₆) δ ppm 8.25 (s, 1H) 7.85 (s, 1H) 4.99 (s, 2H) 4.11 (s, 3H) 3.54 (s, 3H) 2.44 (s, 3H).

### Synthesis of Intermediate B15

[chemical structure]

[0229] To a stirred solution of 5-bromo-6-(methoxymethoxy)-2,7-dimethyl-indazole (B14, 100 mg, 350.71 umol, 1 equiv) and 4,4,5,5-tetramethyl-2-(4,4,5,5-tetramethyl-1,3,2-dioxaborolan-2-yl)-1,3,2-dioxaborolane (133.59 mg, 526.06 umol, 1.5 equiv) in dioxane (1.5 mL) were added Pd(dppf)Cl₂ (25.66 mg, 35.07 umol, 0.1 equiv) and KOAc (103.26 mg, 1.05 mmol, 3 equiv) at 15° C. under nitrogen atmosphere. The resulting mixture was stirred at 100° C. for 2 hr. After filtration, the filtrate was concentrated under reduced pressure to afford 6-(methoxymethoxy)-2,7-dimethyl-5-(4,4,5,5-tetramethyl-1,3,2-dioxaborolan-2-yl)indazole (B15, 100 mg, 50%) as an oil, The product was used in the next step without further purification. LCMS: (ES, m/z): 333 [M+H]⁺.

### Synthesis of Intermediate B17

[chemical structure]

[0230] A mixture of tert-butyl 4-bromopiperidine-1-carboxylate (10.32 g, 39.07 mmol, 2 equiv), Cs₂CO₃ (31.82 g, 97.68 mmol, 5 equiv), KI (6.49 g, 39.07 mmol, 2 equiv) and 5-chloro-2H-pyrazolo[4,3-b]pyridine (B16, 3 g, 19.54 mmol, 1 equiv) in DMF (30 mL) was stirred at 120° C. for 12 hr. The mixture was quenched with H₂O (150 mL) and extracted with dichloromethane (3×100 mL). The combined organic phases were washed with brine (150 mL), dried over Na₂SO₄, filtered and the filtrate was concentrated to give crude product, which was purified by column chromatography on silica gel, eluted with petroleum ether/ethyl acetate (1:10 to 1:2) to give tert-butyl 4-(5-chloropyrazolo[4,3-b]pyridin-2-yl)piperidine-1-carboxylate (B17, 0.4 g, 5%) as a solid. LCMS: (ES, m/z): 337 [M+H]⁺. ¹H NMR (400 MHz, Methanol-d₄) δ 8.48 (s, 1H), 8.09 (dd, 1H, J=0.8, 9.0 Hz), 7.30 (d, 1H, J=9.0 Hz), 4.75 (tt, 1H, J=4.3, 11.4 Hz), 4.27 (d, 2H, J=13.4 Hz), 3.03 (s, 2H), 2.0-2.3 (m, 4H), 1.49 (s, 9H).

### Synthesis of Intermediate B18

[chemical structure]

[0231] To a stirred solution of 6-(methoxymethoxy)-2,7-dimethyl-5-(4,4,5,5-tetramethyl-1,3,2-dioxaborolan-2-yl)indazole (B15, 100 mg, 301.02 umol, 1 equiv) and tert-butyl 4-(5-chloropyrazolo[4,3-b]pyridin-2-yl)piperidine-1-carboxylate (B17, 101.39 mg, 301.02 umol, 1 equiv) in dioxane (1.6 mL) and H₂O (0.4 mL) were added Pd(dppf)Cl₂ (22.03 mg, 30.10 umol, 0.1 equiv) and K₂CO₃ (124.81 mg, 903.07 umol, 3 equiv) at 25° C. under nitrogen atmosphere. The resulting mixture was stirred at 80° C. for 2 hrs. After filtration, the filtrate was concentrated under reduced pressure to get a residue. The residue was purified by silica gel column chromatography, eluted with ethyl acetate/MeOH (5:1) to afford tert-butyl 4-[5-[5-(methoxymethoxy)-2,7-dimethyl-indazol-6-yl]pyrazolo[4,3-b]pyridin-2-yl]piperidine-1-carboxylate (B18, 25 mg, 80%) as a solid. LCMS: (ES, m/z): 507 [M+H]⁺.

### Synthesis of Compound 109

[chemical structure]

[0232] To a stirred solution of tert-butyl 4-[5-[5-(methoxymethoxy)-2,7-dimethyl-indazol-6-yl]pyrazolo[4,3-b]pyridin-2-yl]piperidine-1-carboxylate (B18, 25 mg, 49.35 umol, 1 equiv) in ethyl acetate (0.1 mL) was added HCl/ethyl acetate (4 M, 0.5 mL) dropwise at 25° C. under nitrogen atmosphere. The resulting mixture was stirred at 25° C. for 20 min. After filtration, the filter cake was collected and dried in vacuum to afford 2,7-dimethyl-5-[2-(4-piperidyl)pyrazolo[4,3-b]pyridin-5-yl]indazol-6-ol (Compound 109, 19.53 mg, 98%) as a solid. LCMS: (ES, m/z): 363 [M+H]⁺. ¹H NMR (400 MHz, DMSO-d₆) δ 9.03-9.19 (m, 1H), 8.84-8.99 (m, 1H), 8.81 (s, 1H), 8.46 (s, 1H), 8.40 (s, 1H), 8.34 (d, J=9.4 Hz, 1H), 8.22 (d, J=9.6 Hz, 1H), 4.93 (t, J=7.3 Hz, 1H), 4.15 (s, 3H), 3.47 (d, J=12.28 Hz, 2H), 3.07-3.23 (m, 2H), 2.36 (d, J=3.70 Hz, 7H).

### Example 4: Synthesis of Compound 122

### Synthesis of Intermediate B19

[chemical structure]

[0233] To a mixture of tert-butyl 4-(5-bromo-7-fluoro-2H-indazol-2-yl)-piperidine-1-carboxylate (B3, 2.5 g, 6.28 mmol, 1 equiv) and Bis(pinacolato)diboron (4.78 g, 18.83 mmol, 3 equiv) in dioxane (25 mL) was added potassium acetate (1.23 g, 12.55 mmol, 2 equiv) and [1,1′-Bis(diphenylphosphino)ferrocene]-dichloropalladium (II) (493.89 mg, 627.72 umol, 0.1 equiv) successively. The reaction mixture was bubbled with argon for 5 mins and stirred at 100° C. for 1 hr. The reaction mixture was filtered and the filtrate was concentrated in vacuum to get a brown oil. The brown oil was purified by column chromatography on silica gel eluted with petroleum ether/ethyl acetate (1/0 to 5/1) to give tert-butyl-4-(7-fluoro-5-(4,4,5,5-tetramethyl-1,3,2-dioxaborolan-2-yl)-2H-indazol-2-yl)piperidine-1-carboxylate (B19, 3 g, 91%) as an oil. LCMS: (ESI, m/z): 319 [M+H]⁺. ¹H NMR (400 MHz, DMSO) δ ppm 8.66 (d, J=2.81 Hz, 1H) 7.95 (s, 1H) 7.07 (d, J=12.23 Hz, 1H) 4.76 (s, 1H) 4.10 (br d, J=12.10 Hz, 2H) 2.97 (br s, 2H) 2.10-2.20 (m, 2H) 1.89-1.98 (m, 2H) 1.43 (s, 9H) 1.30 (s, 12H)

### Synthesis of Intermediate B21

[chemical structure]

[0234] To a mixture of tert-butyl 4-(7-fluoro-5-(4,4,5,5-tetramethyl-1,3,2-dioxaborolan-2-yl)-2H-indazol-2-yl)piperidine-1-carboxylate (B19, 300 mg, 673.65 umol, 2 equiv) and 6-chloro-2,8-dimethylimidazo[1,2-b]pyridazine (B20, 61.17 mg, 336.83 umol, 1 equiv) in dioxane (2.4 mL) and H₂O (0.6 mL) was added K₂CO₃ (93.10 mg, 673.65 umol, 2 equiv) and [1,1′-Bis(diphenylphosphino)ferrocene]-dichloropalladium (II) (49.29 mg, 67.37 umol, 0.2 equiv) successively. The reaction mixture was stirred at 80° C. for 1 hr. The reaction mixture was quenched with water (10 mL), and extracted with ethyl acetate (3×10 mL). The organic layer was dried over Na₂SO₄, filtered and concentrated under reduced pressure to give an oil. The oil was purified by column chromatography on silica gel eluted with petroleum ether/ethyl acetate (10/1 to 1/0) to give tert-butyl 4-(5-(2,8-dimethylimidazo [1,2-b]pyridazin-6-yl)-7-fluoro-2H-indazol-2-yl) piperidine-1-carboxylate (B21, 150 mg, 70%) as an oil. LCMS: (ESI, m/z): 465 [M+H]⁺. ¹H NMR (400 MHz, DMSO) δ ppm 8.74 (d, J=2.81 Hz, 1H) 8.29 (s, 1H) 8.03 (s, 1H) 7.66-7.77 (m, 2H) 3.77 Hz, 1H) 4.80 (tt, J=11.39, 4.13 (br d, J=11.74 Hz, 2H) 3.72-3.86 (m, 1H) 2.60 (s, 3H) 2.40 (s, 3H) 2.11-2.21 (m, 2H) 2.01 (br d, J=4.28 Hz, 1H) 1.91-1.98 (m, 1H) 1.63-1.73 (m, 1H) 1.44 (s, 9H).

### Synthesis of Compound 122

[chemical structure]

[0235] To a solution of tert-butyl 4-(5-(2,8-dimethylimidazo[1,2-b]pyridazin-6-yl)-7-fluoro-2H-indazol-2-yl)piperidine-1-carboxylate (B21, 100 mg, 215.27 umol, 1 equiv) in ethyl acetate (2 mL) was added HCl/ethyl acetate (4 M, 2.02 mL, 37.5 equiv). The reaction mixture was stirred at 25° C. for 1 hr. The reaction mixture was filtered and the filter cake was dried in vacuum to get a yellow residue. The crude product was purified by prep-HPLC (Condition 2, Gradient 1) to afford 6-(7-fluoro-2-(piperidin-4-yl)-2H-indazol-5-yl)-2,8-dimethylimidazo [1,2-b]pyridazine hydrochloride salt (Compound 122, 24.02 mg, 19%) as a solid. LCMS: (ESI, m/z): 365 [M+H]⁺. ¹H NMR (400 MHz, methanol-d₄) δ ppm 8.66 (d, J=2.57 Hz, 1H) 8.43 (d, J=1.22 Hz, 1H) 8.30 (dd, J=4.71, 1.04 Hz, 2H) 7.85 (dd, J=12.84, 1.34 Hz, 1H) 5.00 (tt, J=10.03, 5.07 Hz, 1H) 3.62-3.73 (m, 2H) 3.32-3.37 (m, 2H) 2.82 (d, J=0.98 Hz, 1H) 2.78 (d, J=0.98 Hz, 3H) 2.65 (d, J=0.86 Hz, 3H) 2.44-2.58 (m, 4H). ¹⁹F NMR (400 MHz, methanol-d₄) δ ppm −129.67 (s, 1F).

### Example 5: Synthesis of EVAL-0122-0003

### Synthesis of Intermediate B23

[chemical structure]

[0236] To a mixture of tert-butyl 4-(7-fluoro-5-(4,4,5,5-tetramethyl-1,3,2-dioxaborolan-2-yl)-2H-indazol-2-yl)piperidine-1-carboxylate (B19, 250 mg, 561.38 umol, 1.5 equiv) and 6-bromo-8-chloro-2-methylimidazo[1,2-a]pyridine (B22, 91.88 mg, 374.25 umol, 1 equiv) in dioxane (2 mL) and H₂O (0.5 mL) was added K₂CO₃ (103.45 mg, 748.50 umol, 2 equiv) and [1,1′-Bis(diphenylphosphino)ferrocene]-dichloropalladium (II) (54.77 mg, 74.85 umol, 0.2 equiv) successively. The reaction mixture was stirred at 80° C. for 1 hr under N₂ protection. The reaction mixture was diluted with water (10 mL) and extracted with ethyl acetate (3×10 mL). The organic layer was dried over Na₂SO₄, filtered and concentrated under reduced pressure to give an oil. The oil was purified by column chromatography on silica gel eluted with petroleum ether/ethyl acetate (5/1 to 0/1) to give tert-butyl-4-(5-(8-chloro-2-methylimidazo [1,2-a]pyridin-6-yl)-7-fluoro-2H-indazol-2-yl) piperidine-1-carboxylate (B23, 160 mg, 66%) as an oil. LCMS: (ESI, m/z): 484 [M+H]⁺. ¹H NMR (400 MHz, methanol-d4) δ ppm 8.64 (d, J=1.50 Hz, 1H) 8.48 (d, J=2.63 Hz, 1H) 7.71-7.86 (m, 3H) 7.34 (dd, J=12.63, 1.25 Hz, 1H) 4.74 (tt, J=11.43, 4.14 Hz, 1H) 4.29 (br d, J=13.76 Hz, 2H) 3.04 (br s, 2H) 2.45 (s, 3H) 2.07-2.26 (m, 4H) 1.50 (s, 9H). ¹⁹F NMR (400 MHz, methanol-d4) δ ppm −130.23 (s, 1F).

### Synthesis of Compound 127

[chemical structure]

[0237] To a solution of tert-butyl 4-(5-(8-chloro-2-methylimidazo[1,2-a]pyridin-6-yl)-7-fluoro-2H-indazol-2-yl)piperidine-1-carboxylate (B23, 150 mg, 309.94 umol, 1 equiv) in ethyl acetate (3 mL) was added HCl/ethyl acetate (4 M, 3.01 mL, 38.9 equiv). The reaction was stirred at 25° C. for 1 hr. The reaction mixture was filtered and the filter cake was concentrated in vacuum to give a residue. The residue was triturated with methyl tert-butyl ether (3 mL) to afford 5-(8-chloro-2-methylimidazo[1,2-a]pyridin-6-yl)-7-fluoro-2-(piperidin-4-yl)-2H-indazole hydrochloride salt (Compound 127, 101.70 mg, 72%) as a solid. LCMS: (ESI, m/z): 384 [M+H]⁺. ¹H NMR (400 MHz, methanol-d₄) δ ppm 9.06 (d, J=1.31 Hz, 1H) 8.61 (d, J=2.62 Hz, 1H) 8.46 (d, J=1.31 Hz, 1H) 8.10 (d, J=0.95 Hz, 1H) 7.99 (d, J=1.31 Hz, 1H) 7.45 (dd, J=12.46, 1.25 Hz, 1H) 5.00 (dt, J=10.10, 5.02 Hz, 1H) 3.59-3.72 (m, 2H) 3.32-3.37 (m, 2H) 2.62 (d, J=0.72 Hz, 3H) 2.44-2.56 (m, 4H).

### Example 6: Synthesis of Compound 129

### Synthesis of Intermediate B25

[chemical structure]

[0238] To a mixture of tert-butyl 4-(7-fluoro-5-(4,4,5,5-tetramethyl-1,3,2-dioxaborolan-2-yl)-2H-indazol-2-yl)piperidine-1-carboxylate (B19, 250 mg, 561.38 umol, 1.5 equiv) and 6-bromo-8-fluoro-2-methylimidazo[1,2-a]pyridine (B24, 85.72 mg, 374.25 umol, 1 equiv) in dioxane (2 mL) and H₂O (0.5 mL) was added K₂CO₃ (103.45 mg, 748.50 umol, 2 equiv) and [1,1′-Bis(diphenylphosphino)ferrocene]-dichloropalladium (II) (54.77 mg, 74.85 umol, 0.2 equiv) successively. The reaction mixture was stirred at 80° C. for 1 hr. The reaction mixture was diluted with water (10 mL) and extracted with ethyl acetate (3×10 mL). The organic layer was dried over Na₂SO₄, filtered and concentrated under reduced pressure to give an oil. The oil was purified by column chromatography on silica gel eluted with petroleum ether/ethyl acetate (5/1 to 0/1) to give tert-butyl 4-(7-fluoro-5-(8-fluoro-2-methylimidazo[1,2-a]pyridin-6-yl)-2H-indazol-2-yl)piperidine-1-carboxylate (B25, 110 mg, 49%) as an oil. LCMS: (ESI, m/z): 468 [M+H]⁺. 1H NMR (400 MHz, methanol-d4) δ ppm 8.54 (d, J=1.13 Hz, 1H) 8.48 (d, J=2.63 Hz, 1H) 7.80 (s, 1H) 7.74 (d, J=2.75 Hz, 1H) 7.44 (dd, J=12.01, 1.13 Hz, 1H) 7.35 (dd, J=12.63, 1.13 Hz, 1H) 4.74 (s, 1H) 4.29 (br d, J=13.51 Hz, 2H) 3.04 (br s, 2H) 2.44 (s, 3H) 2.05-2.32 (m, 4H) 1.50 (s, 9H). ¹⁹F NMR (400 MHz, methanol-d4) δ ppm −134.04 (s, 1F) −130.31 (s, 1F)

### Synthesis of Compound 129

[chemical structure]

[0239] To a solution of tert-butyl 4-(7-fluoro-5-(8-fluoro-2-methylimidazo[1,2-a]pyridin-6-yl)-2H-indazol-2-yl)piperidine-1-carboxylate (B25, 100 mg, 213.9 umol, 1 equiv) in ethyl acetate (2 mL) was added HCl/ethyl acetate (4 M, 2.01 mL, 37.5 equiv). The reaction was stirred at 25° C. for 1 hr. The reaction mixture was filtered and the filter cake was dried in vacuum to get a residue. The residue was triturated with methyl tert-butyl ether (3 mL) to afford 7-fluoro-5-(8-fluoro-2-methylimidazo[1,2-a]pyridin-6-yl)-2-(piperidin-4-yl)-2H-indazole (Compound 129, 58.46 mg, 60%) as a solid. LCMS: (ESI, m/z): 368 [M+H]⁺. ¹H NMR (400 MHz methanol-d4) δ ppm 8.97 (s, 1H) 8.61 (d, J=2.45 Hz, 1H) 8.23 (d, J=11.13 Hz, 1H) 8.11 (s, 1H) 7.99 (s, 1H) 7.45 (d, J=12.47 Hz, 1H) 4.95-5.05 (m, 1H) 3.61-3.72 (m, 2H) 3.32-3.37 (m, 2H) 2.61 (s, 3H) 2.43-2.56 (m, 4H). ¹⁹F NMR (400 MHz methanol-d4) δ ppm −134.40 (s, 1F) −129.50 (s, 1F).

### Example 7: Synthesis of Compound 128

### Synthesis of Intermediate B27

[chemical structure]

[0240] To a mixture of tert-butyl 4-(7-fluoro-5-(4,4,5,5-tetramethyl-1,3,2-dioxaborolan-2-yl)-2H-indazol-2-yl)piperidine-1-carboxylate (B19, 300 mg, 673.65 umol, 1.5 equiv) and 5-chloro-2-methyl-2H-pyrazolo[4,3-b]pyridine (B26, 75.27 mg, 449.10 umol, 1 equiv) in dioxane (2.4 mL) and H₂O (0.6 mL) was added K₂CO₃ (124.14 mg, 898.2 umol, 2 equiv) and [1,1′-Bis(diphenylphosphino)ferrocene]-dichloropalladium (II) (65.72 mg, 89.82 umol, 0.2 equiv) successively. The reaction mixture was stirred at 80° C. for 1 hr. The reaction mixture was diluted with water (10 mL) and extracted with ethyl acetate (3×10 mL). The organic layer was dried over Na₂SO₄, filtered and concentrated under reduced pressure to give an oil. The oil was purified by column chromatography on silica gel eluted with petroleum ether/ethyl acetate (5/1 to 0/1) to give tert-butyl 4-(7-fluoro-5-(2-methyl-2H-pyrazolo [4,3-b]pyridin-5-yl)-2H-indazol-2-yl) piperidine-1-carboxylate (B27, 140 mg, 64%) as an oil. LCMS: (ESI, m/z): 451 [M+H]⁺. ¹H NMR (400 MHz, methanol-d₄) δ ppm 8.52 (d, J=2.75 Hz, 1H) 8.44 (s, 1H) 8.11-8.19 (m, 2H) 7.91 (d, J=9.13 Hz, 1H) 7.79 (dd, J=13.20 Hz, 1.19 Hz, 1H) 4.61-4.81 (m, 1H) 4.24-4.34 (m, 5H) 3.04 (br s, 2H) 2.07-2.30 (m, 4H) 1.51 (s, 9H).

### Synthesis of Compound 128

[chemical structure]

[0241] To a solution of tert-butyl 4-(7-fluoro-5-(2-methyl-2H-pyrazolo[4,3-b]pyridin-5-yl)-2H-indazol-2-yl)piperidine-1-carboxylate (B27, 140 mg, 310.76 umol, 1 equiv) in ethyl acetate (2.3 mL) was added HCl/ethyl acetate (4 M, 2.84 mL, 36.5 equiv). The reaction was stirred at 25° C. for 1 hr. The reaction mixture was filtered and the filter cake was dried in vacuum to get residue. The residue was triturated with methyl tert-butyl ether (3 mL) to afford 5-(7-fluoro-2-(piperidin-4-yl)-2H-indazol-5-yl)-2-methyl-2H-pyrazolo[4,3-b]pyridine hydrochloride salt (Compound 128, 123.43 mg, 93%) as a solid. LCMS: (ESI, m/z): 351 [M+H]⁺. ¹HNMR (400 MHz, methanol-d₄) δ ppm 8.89 (dd, J=9.06, 0.60 Hz, 1H) 8.77-8.82 (m, 2H) 8.44 (d, J=1.43 Hz, 1H) 8.24 (d, J=9.06 Hz, 1H) 7.72 (dd, J=12.16, 1.43 Hz, 1H) 5.06 (dt, J=10.04, 5.05 Hz, 1H) 4.44 (s, 3H) 3.61-3.73 (m, 2H) 3.32-3.39 (m, 2H) 2.44-2.62 (m, 4H). ¹⁹F NMR (400 MHz, methanol-d₄) δ ppm −128.14 (s, 1F).

### Example 8: Synthesis of Compound 171

### Synthesis of Intermediate B29

[chemical structure]

[0242] To a mixture of 6-(7-fluoro-2H-indazol-5-yl)-2,8-dimethyl-imidazo[1,2-b]pyridazine (400 mg, 1.42 mmol, 1.0 eq), tert-butyl 7-(p-tolylsulfonyloxy)-4-azaspiro[2.5]octane-4-carboxylate (596 mg, 1.56 mmol, 1.10 eq) in dimethyl formamide (10.0 mL) was added cesium carbonate (1.39 g, 4.27 mmol, 3.0 eq). The reaction was stirred at 80° C. for 12 hrs under nitrogen. The reaction mixture was diluted with water (50.0 mL), extracted with ethyl acetate (3×50.0 mL), washed with brine (100 mL), dried over Na₂SO₄, filtered and the filtrate was concentrated under reduced pressure to give a residue. The residue was purified by prep-HPLC (Condition 3, Gradient 1) to afford tert-butyl7-[5-(2,8-dimethylimidazo[1,2-b]pyridazin-6-yl)-7-fluoro-indazol-2-yl]-4-azaspiro [2.5]octane-4-carboxylate (0.150 g, 22%) as a solid. LCMS: (ESI, m/z): 491.4 [M+H]⁺. ¹H NMR (400 MHz, DMSO-d6) δ ppm 8.74 (d, J=2.7 Hz, 1H), 8.29 (s, 1H), 8.03 (s, 1H), 7.76-7.70 (m, 2H), 5.03-4.93 (m, 1H), 4.11-4.02 (m, 1H), 3.09-3.00 (m, 1H), 2.60 (s, 3H), 2.40 (s, 3H), 2.22-2.14 (m, 1H), 2.06-1.97 (m, 1H), 1.64-1.51 (m, 2H), 1.45 (s, 9H), 1.24-1.16 (m, 1H), 0.94-0.90 (m, 1H), 0.73-0.68 (m, 1H), 0.62 (br d, J=1.6 Hz, 1H)

### Synthesis of Compound 171

[chemical structure]

[0243] To a solution of tert-butyl 7-[5-(2,8-dimethylimidazo[1,2-b]pyridazin-6-yl)-7-fluoro-indazol-2-yl]-4-azaspiro[2.5]octane-4-carboxylate (100 mg, 203 umol, 1.0 eq) in dioxane (0.400 mL) was added HCl/dioxane (4.0 M, 0.800 mL). The reaction was stirred at 25° C. for 1 hr. The reaction mixture was filtered and the filter cake was dried over under reduced pressure to give 6-[2-(4-azaspiro[2.5]octan-7-yl)-7-fluoro-indazol-5-yl]-2,8-dimethyl-imidazo[1,2-b]pyridazine (34.8 mg, 42%) as a solid. LCMS: (ESI, m/z): 391.1 [M+H]⁺. ¹H NMR (400 MHz, methanol-d4) δ ppm 8.67 (d, J=2.3 Hz, 1H), 8.43 (s, 1H), 8.31 (d, J=7.3 Hz, 2H), 7.85 (d, J=12.9 Hz, 1H), 5.17-5.06 (m, 1H), 3.72-3.67 (m, 1H), 3.66-3.58 (m, 1H), 3.48-3.39 (m, 1H), 2.99-2.88 (m, 1H), 2.78 (s, 3H), 2.65 (s, 3H), 2.61-2.51 (m, 2H), 1.96 (dd, J=3.7, 13.9 Hz, 1H), 1.16 (s, 1H), 1.11-1.05 (m, 1H), 1.02-0.95 (m, 1H)

### Example 9: Synthesis of Compound 174

[chemical structure]

[0244] To a solution of 6-[2-(4-azaspiro[2.5]octan-7-yl)-7-fluoro-indazol-5-yl]-2,8-dimethyl-imidazo [1,2-b]pyridazine (50.0 mg, 128 umol, 1.0 eq) in methanol (1.00 mL) was added trimethylamine (35.6 uL, 256 umol, 2.0 eq), the mixture was stirred at 30° C. for 30 minutes. Then, acetic acid (7.32 uL, 128 umol, 1.0 eq), sodium cyanoborohydride (8.05 mg, 128 umol, 1.0 eq) and formaldehyde (7.69 mg, 256 umol, 2.0 eq) was added to the above mixture. The reaction mixture was stirred at 25° C. for 12 hrs. The reaction mixture was quenched with water (3.00 mL), extracted with ethyl acetate (3×3.00 mL), washed with brine (3.00 mL), dried over Na₂SO₄, filtered and the filtrate was concentrated under reduced pressure to give a residue. The residue was purified by prep-HPLC (Condition 2, Gradient 7) to afford 6-[7-fluoro-2-(4-methyl-4-azaspiro[2.5]octan-7-yl)indazol-5-yl]-2,8-dimethyl-imidazo[1,2-b]pyridazine (8.53 mg, 16%) as a solid. LCMS: (ESI, m/z): 405.3 [M+H]⁺. ¹H NMR (400 MHz, methanol-d4) δ ppm 8.56 (d, J=2.7 Hz, 1H), 8.21 (d, J=1.2 Hz, 1H), 7.90 (d, J=0.6 Hz, 1H), 7.77 (dd, J=1.2, 13.1 Hz, 1H), 7.63 (d, J=1.0 Hz, 1H), 4.85-4.81 (m, 1H), 3.27-3.21 (m, 1H), 3.19-3.10 (m, 1H), 2.87 (t, J=12.5 Hz, 1H), 2.66 (d, J=1.0 Hz, 3H), 2.65 (s, 3H), 2.58 (dd, J=4.2, 12.4 Hz, 1H), 2.48 (s, 3H), 2.09-2.01 (m, 1H), 1.46-1.39 (m, 1H), 0.86-0.79 (m, 2H), 0.77-0.71 (m, 1H), 0.67-0.58 (m, 1H)

### Example 10: Synthesis of Compound 177

[chemical structure]

[0245] To a solution of 6-[2-(4-azaspiro[2.5]octan-7-yl)-7-fluoro-indazol-5-yl]-2,8-dimethyl-imidazo [1,2-b]pyridazine (50.0 mg, 128 umol, 1.0 eq) in methanol (1.0 mL) was added trimethylamine (35.6 uL, 256 umol, 2.0 eq), the mixture was stirred at 25° C. for 30 minutes. Then, acetic acid (7.32 uL, 128 umol, 1.0 eq), sodium cyanoborohydride (8.05 mg, 128 umol, 1.0 eq) and acetaldehyde (11.2 mg, 256 umol, 2.0 eq) was added to the above mixture. The reaction mixture was stirred at 25° C. for 11.5 hrs. The reaction mixture was quenched with water (3.00 mL), extracted with ethyl acetate (3×3.00 mL), washed with brine (3.00 mL), dried over Na₂SO₄, filtered and the filtrate was concentrated under reduced pressure to give a residue. The residue was purified by prep-HPLC (Condition 2, Gradient 7) to afford 6-[2-(4-ethyl-4-azaspiro[2.5]octan-7-yl)-7-fluoro-indazol-5-yl]-2,8-dimethyl-imidazo[1,2-b]pyridazine (11.6 mg, 22%) as a solid. LCMS: (ESI, m/z): 419.3 [M+H]⁺. ¹H NMR (400 MHz, methanol-d4) δ ppm 8.56 (d, J=2.7 Hz, 1H), 8.21 (d, J=1.2 Hz, 1H), 7.90 (d, J=0.7 Hz, 1H), 7.77 (dd, J=1.2, 13.1 Hz, 1H), 7.63 (d, J=1.0 Hz, 1H), 4.85-4.80 (m, 1H), 3.25 (br s, 1H), 3.17-3.08 (m, 2H), 2.94-2.76 (m, 2H), 2.66 (d, J=1.0 Hz, 3H), 2.48 (d, J=0.6 Hz, 4H), 1.99-1.90 (m, 1H), 1.35 (br dd, J=2.6, 13.1 Hz, 1H), 1.15 (t, J=7.3 Hz, 3H), 0.86-0.73 (m, 2H), 0.70-0.58 (m, 2H)

### Example 11: Synthesis of Compound 180

[chemical structure]

[0246] A mixture of 2-bromoethanol (90.9 uL, 1.28 mmol, 5.0 eq), 6-[2-(4-azaspiro[2.5]octan-7-yl)-7-fluoro-indazol-5-yl]-2,8-dimethyl-imidazo[1,2-b]pyridazine (100 mg, 256 umol, 1.0 eq), potassium carbonate (176 mg, 1.28 mmol, 5.0 eq), potassium iodide (212 mg, 1.28 mmol, 5.0 eq) in dimethyl formamide (2.00 mL) was stirred at 100° C. for 12 hrs. The reaction mixture was diluted with water (3.00 mL), extracted with ethyl acetate (3×3.00 mL), washed with brine (3.00 mL), dried over Na₂SO₄, filtered and the filtrate was concentrated under reduced pressure to give residue. The residue was purified by prep-HPLC (Condition 4, Gradient 1) to afford 2-[7-[5-(2,8-dimethylimidazo[1,2-b]pyridazin-6-yl)-7-fluoro-indazol-2-yl]-4-azaspiro[2.5]octan-4-yl]ethanol (18.0 mg, 16%) as a solid. LCMS: (ESI, m/z): 435.3 [M+H]⁺. ¹H NMR (400 MHz, methanol-d4) δ ppm 8.55 (d, J=2.8 Hz, 1H), 8.20 (d, J=1.0 Hz, 1H), 7.89 (s, 1H), 7.75 (dd, J=1.1, 13.1 Hz, 1H), 7.62 (d, J=0.9 Hz, 1H), 4.82-4.79 (m, 1H), 3.66-3.56 (m, 2H), 3.24-3.07 (m, 3H), 2.90 (td, J=6.8, 13.4 Hz, 1H), 2.72 (t, J=12.4 Hz, 1H), 2.66 (s, 3H), 2.52-2.46 (m, 4H), 1.93 (br dd, J=1.9, 12.7 Hz, 1H), 1.40-1.33 (m, 1H), 0.84-0.72 (m, 2H), 0.66-0.52 (m, 2H)

### Example 12: Synthesis of Compound 183

[chemical structure]

[0247] A mixture of bromomethylcyclopropane (172 mg, 1.28 mmol, 5.0 eq), 6-[2-(4-azaspiro [2.5]octan-7-yl)-7-fluoro-indazol-5-yl]-2,8-dimethyl-imidazo[1,2-b]pyridazine (100 mg, 256 umol, 1.0 eq), potassium carbonate (176 mg, 1.28 mmol, 5.0 eq), potassium iodide (212 mg, 1.28 mmol, 5.0 eq) in dimethyl formamide (2.00 mL) was stirred at 100° C. for 12 hrs. The reaction mixture was diluted with water (3.00 mL), extracted with ethyl acetate (3×3.00 mL), washed with brine (3.00 mL), dried over Na₂SO₄, filtered and the filtrate was concentrated under reduced pressure to give a residue. The residue was purified by prep-HPLC (Condition 4, Gradient 2) to afford 6-[2-[4-(cyclopropylmethyl)-4-azaspiro[2.5]octan-7-yl]-7-fluoro-indazol-5-yl]-2,8-dimethyl-imidazo[1,2-b]pyridazine (5.32 mg, 5%) as a solid. LCMS: (ESI, m/z): 445.3 [M+H]⁺. ¹H NMR (400 MHz, methanol-d4) δ ppm 8.55 (d, J=2.8 Hz, 1H), 8.20 (d, J=1.1 Hz, 1H), 7.90 (d, J=0.6 Hz, 1H), 7.76 (dd, J=1.2, 13.1 Hz, 1H), 7.62 (d, J=0.9 Hz, 1H), 4.90-4.85 (m, 1H), 3.52-3.43 (m, 1H), 3.19-3.10 (m, 1H), 2.84-2.70 (m, 3H), 2.66 (d, J=0.8 Hz, 3H), 2.53-2.42 (m, 4H), 1.97-1.87 (m, 1H), 1.34-1.26 (m, 1H), 0.94-0.75 (m, 3H), 0.66-0.51 (m, 4H), 0.34-0.17 (m, 2H)

### Example 13: Synthesis of Compound 186

[chemical structure]

[0248] To a solution of 6-[2-(4-azaspiro[2.5]octan-7-yl)-7-fluoro-indazol-5-yl]-2,8-dimethyl-imidazo [1,2-b]pyridazine (50.0 mg, 128 umol, 1.0 eq) in methanol (1.0 mL) was added trimethylamine (35.6 uL, 256 umol, 2.0 eq), the mixture was stirred at 30° C. for 30 mins. Then, acetic acid (7.32 uL, 128 umol, 1.0 eq), sodium cyanoborohydride (8.05 mg, 128 umol, 1.0 eq) and cyclobutanone (38.2 uL, 512 umol, 2.0 eq) was added to the above mixture. The reaction mixture was stirred at 30° C. for 11.5 hrs. LCMS showed the reaction was completed. The reaction mixture was quenched with water (3.00 mL), extracted with ethyl acetate (3×3.00 mL), washed with brine (3.00 mL), dried over Na₂SO₄, filtered and the filtrate was concentrated under reduced pressure to give residue. The residue was purified by prep-HPLC (Condition 4, Gradient 3) to give a residue. The residue was purified by prep-HPLC (Condition 4, Gradient 2) to give (6-[2-(4-cyclo butyl-4-azaspiro[2.5]octan-7-yl)-7-fluoro-indazol-5-yl]-2,8-dimethyl-imidazo[1,2-b]pyridazine (11.2 mg, 10%) as a solid. LCMS: (ESI, m/z): 445.3 [M+H]⁺. ¹H NMR (400 MHz, methanol-d4) δ ppm 8.56 (d, J=2.6 Hz, 1H), 8.21 (d, J=1.0 Hz, 1H), 7.91 (s, 1H), 7.77 (dd, J=1.1, 13.1 Hz, 1H), 7.64 (d, J=0.8 Hz, 1H), 4.03-3.92 (m, 1H), 3.17-3.11 (m, 1H), 3.01 (dt, J=2.6, 13.4 Hz, 1H), 2.90-2.81 (m, 1H), 2.67 (d, J=0.8 Hz, 3H), 2.49 (s, 3H), 2.45-2.32 (m, 1H), 2.25-2.11 (m, 2H), 1.97-1.81 (m, 3H), 1.79-1.68 (m, 2H), 1.32-1.24 (m, 1H), 0.97-0.91 (m, 1H), 0.66-0.58 (m, 1H), 0.56-0.49 (m, 2H)

### Example 14: Synthesis of Compound 192 Synthesis of Intermediate B31

[chemical structure]

[0249] To a mixture of 5-bromo-2-nitro-benzaldehyde (1.0 g, 4.35 mmol, 1.0 eq) and tert-butyl 4-aminopiperidine-1-carboxylate (41-2, 957 mg, 4.78 mmol, 1.10 eq) in propan-2-ol (15.0 mL) was stirred at 80° C. for 2 hrs. The reaction was cooled to 25° C., and added tributylphosphane (2.64 g, 13.0 mmol, 3.22 mL, 3.0 eq). The reaction mixture was then stirred at 80° C. for 12 hrs. TLC (petroleum ether/ethyl acetate=5/1, Rf=0.4) showed the reaction was completed. The reaction mixture was quenched with water (30.0 mL), extracted with ethyl acetate (3×30.0 mL), washed with brine (30.0 mL), dried over Na₂SO₄, filtered and the filtrate was concentrated under reduced pressure to give residue. The residue was purified by flash column chromatography (petroleum ether/ethyl acetate=5/1) to give tert-butyl 4-(5-bromoindazol-2-yl) piperidine-1-carboxylate (1.20 g, 73% yield) as an oil. LCMS: (ESI, m/z): 381.2 [M+1]⁺. ¹H NMR (400 MHz, chloroform-d) δ ppm 7.91 (s, 1H), 7.82 (d, J=0.9 Hz, 1H), 7.59 (d, J=9.1 Hz, 1H), 7.34 (dd, J=1.6, 9.1 Hz, 1H), 4.55 (tt, J=4.0, 11.5 Hz, 1H), 2.95 (br t, J=11.6 Hz, 2H), 2.29-2.20 (m, 2H), 2.14-2.06 (m, 2H), 1.76-1.56 (m, 2H), 1.49 (s, 9H)

### Synthesis of Intermediate B32

[chemical structure]

[0250] To a mixture of 2,8-dimethyl-6-(4,4,5,5-tetramethyl-1,3,2-dioxaborolan-2-yl)imidazo[1,2-b]pyridazine (143 mg, 525 umol, 1.0 eq), tert-butyl 4-(5-bromoindazol-2-yl)piperidine-1-carboxylate (200 mg, 525 umol, 1.0 eq) and potassium phosphate (446 mg, 2.10 mmol, 4.0 eq) in ethanol (20.0 mL) and H₂O (5.00 mL) was added Chloro(2-Dicyclohexylphosphino-2 [symbol] [symbol] [symbol] Triisopropyl-1,1 [symbol] phenyl)[2-(2 Amino-1,1 [symbol] Biphenyl)]Palladium(Ii) (41.3 mg, 52.5 umol, 0.100 eq). The reaction mixture was then stirred at 80° C. for 12 hrs. The reaction mixture was diluted with water (50.0 mL), extracted with ethyl acetate (3×50.0 mL), washed with brine (30.0 mL), dried over Na₂SO₄, filtered and the filtrate was concentrated under reduced pressure to give residue. The residue was purified by flash column chromatography (petroleum ether/ethyl acetate=5/1) to give tert-butyl 4-[5-(2,8-dimethylimidazo[1,2-b]pyridazin-6-yl)indazol-2-yl]piperidine-1-carboxylate (200 mg, 43%) as a solid. LCMS: (ESI, m/z): 447.3 [M+H]⁺. ¹H NMR (400 MHz, chloroform-d) δ ppm 8.21 (s, 1H), 8.07 (s, 1H), 7.94 (dd, J=1.6, 9.1 Hz, 1H), 7.82 (d, J=9.1 Hz, 1H), 7.77 (s, 1H), 7.31 (s, 1H), 4.67-4.55 (m, 1H), 3.03-2.92 (m, 2H), 2.72 (s, 3H), 2.54 (s, 3H), 2.33-2.25 (m, 3H), 2.20-2.10 (m, 2H), 2.07 (s, 1H), 1.50 (s, 9H)

### Synthesis of Compound 192

[chemical structure]

[0251] A solution of tert-butyl 4-[5-(2,8-dimethylimidazo[1,2-b]pyridazin-6-yl)indazol-2-yl]piperidine-1-carboxylate (41-4, 200 mg, 447 umol, 1.0 eq) in HCl/methanol (4.0 M, 0.100 mL) was stirred at 25° C. for 1 hr. LCMS showed the reaction was completed. The reaction mixture was filtered and the filter cake was dried over reduced pressure to give residue. The residue was triturated with methyl tert-butyl ether (5.00 mL) and filtered. The filter cake was dried over in vacuum to give 2,8-dimethyl-6-[2-(4-piperidyl)indazol-5-yl]imidazo[1,2-b]pyridazine (69.9 mg, 43%) as a solid. LCMS: (ESI, m/z): 347.1 [M+H]⁺. ¹H NMR (400 MHz, methanol-d4) δ ppm 8.61-8.54 (m, 2H), 8.30 (dd, J=0.9, 6.1 Hz, 2H), 8.13 (dd, J=1.7, 9.2 Hz, 1H), 7.81 (d, J=9.3 Hz, 1H), 5.02-4.93 (m, 1H), 3.71-3.62 (m, 2H), 3.37-3.33 (m, 2H), 2.79 (d, J=1.0 Hz, 3H), 2.65 (d, J=0.8 Hz, 3H), 2.54-2.44 (m, 4H)

### Example 15: Synthesis of Compounds 190 and 191

[chemical structure]

[0252] 6-[2-(4-azaspiro[2.5]octan-7-yl)-7-fluoro-indazol-5-yl]-2,8-dimethyl-imidazo[1,2-b]pyridazine (EVAL-0167-0028, 500 mg) was separated by SFC (column: DAICEL CHIRALCEL OJ (250 mm*30 mm, 10 um); mobile phase: [0.1% NH₃H₂O in ethanol]; B %: 20%-40%, 13 min) to give 6-[2-[(7S)-4-azaspiro[2.5]octan-7-yl]-7-fluoro-indazol-5-yl]-2,8-dimethylimidazo[1,2-b]pyridazine (35.5 mg, 7.11% yield) as white solid and 6-[2-[(7R)-4-azaspiro[2.5]octan-7-yl]-7-fluoro-indazol-5-yl]-2,8-dimethyl-imidazo[1,2-b]pyridazine (33.7 mg, 7% yield) as solid. Compound 190: LCMS (ESI, m/z): 391.1[M+H]⁺. ¹H NMR (400 MHz, methanol-d4) δ ppm 8.53 (d, J=2.8 Hz, 1H), 8.20 (d, J=1.0 Hz, 1H), 7.89 (d, J=0.6 Hz, 1H), 7.75 (dd, J=1.2, 13.1 Hz, 1H), 7.62 (d, J=0.9 Hz, 1H), 4.84-4.80 (m, 1H), 3.26-3.19 (m, 1H), 3.02-2.94 (m, 1H), 2.66 (d, J=0.9 Hz, 3H), 2.61-2.53 (m, 1H), 2.48 (s, 3H), 2.33-2.27 (m, 1H), 2.24-2.15 (m, 1H), 1.71-1.64 (m, 1H), 0.79-0.74 (m, 1H), 0.73-0.69 (m, 1H), 0.67-0.62 (m, 2H) Compound 191: LCMS (ESI, m/z): 391.1[M+H]⁺. ¹H NMR (400 MHz, methanol-d4) δ ppm 8.53 (d, J=2.8 Hz, 1H), 8.21 (d, J=1.1 Hz, 1H), 7.90 (d, J=0.6 Hz, 1H), 7.76 (dd, J=1.2, 13.1 Hz, 1H), 7.63 (d, J=1.0 Hz, 1H), 4.83-4.78 (m, 1H), 3.22-3.16 (m, 1H), 2.99-2.89 (m, 1H), 2.66 (d, J=0.9 Hz, 3H), 2.59-2.50 (m, 1H), 2.48 (s, 3H), 2.31-2.25 (m, 1H), 2.21-2.13 (m, 1H), 1.68-1.61 (m, 1H), 0.75-0.71 (m, 1H), 0.68-0.63 (m, 1H), 0.63-0.59 (m, 2H)

### Example 16: Synthesis of Compound 201

### Synthesis of Intermediate B34

[chemical structure]

[0253] To a suspension of 5-chloro-2H-pyrazolo[4,3-b]pyridine (300 mg, 1.95 mmol, 1.00 eq), tert-butyl 7-(p-tolylsulfonyloxy)-4-azaspiro[2.5]octane-4-carboxylate (819 mg, 2.15 mmol, 1.10 eq) in dimethyl formamide (7.50 mL) was added cesium carbonate (1.91 g, 5.86 mmol, 3.00 eq). The reaction was stirred at 100° C. for 2 hrs. The reaction mixture was diluted with water (20.0 mL), extracted with ethyl acetate (3×20.0 mL), washed with brine (20.0 mL), dried over Na₂SO₄, filtered and concentrated under reduced pressure to give residue. The residue was purified by prep-HPLC (Condition 3, Gradient 2) to afford tert-butyl 7-(5-chloropyrazolo[4,3-b]pyridin-2-yl)-4-azaspiro[2.5]octane-4-carboxylate (180 mg, 25%) as a solid. LCMS: (ESI, m/z): 363.6 [M+H]⁺. ¹H NMR (400 MHz, chloroform-d) δ ppm 8.10 (s, 1H), 7.99 (d, J=9.0 Hz, 1H), 7.20 (d, J=9.0 Hz, 1H), 4.86-4.74 (m, 1H), 4.27 (br d, J=13.5 Hz, 1H), 3.13-3.02 (m, 1H), 2.61-2.49 (m, 1H), 2.26 (br dd, J=2.2, 12.8 Hz, 1H), 2.17-2.04 (m, 1H), 1.60 (br s, 1H), 1.50 (s, 9H), 1.44-1.35 (m, 1H), 1.02-0.93 (m, 1H), 0.72-0.58 (m, 2H)

### Synthesis of Intermediate B35

[chemical structure]

[0254] To a mixture of tert-butyl 7-(5-chloropyrazolo[4,3-b]pyridin-2-yl)-4-azaspiro[2.5]octane-4-carboxylate (40-4, 90.0 mg, 248 umol, 1.00 eq), 2,8-dimethyl-6-(4,4,5,5-tetramethyl-1,3,2-dioxaborolan-2-yl)imidazo[1,2-b]pyridazine (A2, 241 mg, 248 umol, 1.00 eq), potassium carbonate (137 mg, 992 umol, 4.00 eq) in dioxane (1.20 mL) and H₂O (0.300 mL) was added 1,1 [symbol] bis(diphenylphosphino)ferrocenedichloro palladium(II) (18.1 mg, 24.8 umol, 0.100 eq). The reaction was stirred at 80° C. for 2 hrs. The reaction mixture was quenched with water (10.0 mL), extracted with ethyl acetate (3×10.0 mL), washed with brine (10.0 mL), dried over Na₂SO₄, filtered and the filtrate was concentrated under reduced pressure to give residue. The residue was purified by flash column chromatography (petroleum ether/ethyl acetate=5/1) to give tert-butyl 7-[5-(2,8-dimethylimidazo[1,2-b]pyridazin-6-yl)pyrazolo[4,3-b]pyridin-2-yl]-4-azaspiro[2.5]octane-4-carboxylate (40-3, 200 mg, 85%) as a solid. LCMS: (ESI, m/z): 474.6 [M+1]⁺. ¹H NMR (400 MHz, chloroform-d) δ ppm 8.36-8.28 (m, 2H), 8.15 (d, J=9.2 Hz, 1H), 8.07 (br s, 1H), 7.78 (s, 1H), 4.87 (tt, J=4.3, 11.7 Hz, 1H), 4.29 (br d, J=12.2 Hz, 1H), 3.11 (br t, J=12.0 Hz, 1H), 2.76 (s, 3H), 2.57 (s, 3H), 2.37-2.27 (m, 1H), 2.20-2.08 (m, 1H), 1.52 (s, 9H), 1.45-1.34 (m, 2H), 1.30-1.27 (m, 1H), 1.04-0.94 (m, 1H), 0.74-0.61 (m, 2H)

### Synthesis of Compound 201

[chemical structure]

[0255] A solution of tert-butyl 7-[5-(2,8-dimethylimidazo[1,2-b]pyridazin-6-yl)pyrazolo[4,3-b]pyridin-2-yl]-4-azaspiro[2.5]octane-4-carboxylate (40-3, 150 mg, 316 umol, 1.00 eq) in HCl/MeOH (4.0 M, 1.50 mL) was stirred at 25° C. for 1 hr. The reaction mixture was concentrated under reduced pressure to give residue. The residue was purified by prep-HPLC (Condition 4, Gradient 3) to afford 6-[2-(4-azaspiro[2.5]octan-7-yl)pyrazolo[4,3-b]pyridine-5-yl]-2,8-dimethyl-imidazo[1,2-b]pyridazine (70.0 mg, 59.1%) as a solid. LCMS: (ESI, m/z): 374.2 [M+H]⁺. ¹H NMR (400 MHz, methanol-d4) δ ppm 8.77 (s, 1H), 8.73 (s, 1H), 8.41 (d, J=9.2 Hz, 1H), 8.34 (s, 1H), 8.28 (d, J=9.2 Hz, 1H), 5.15 (ddd, J=4.3, 11.0, 15.4 Hz, 1H), 3.69 (td, J=3.6, 12.8 Hz, 1H), 3.47-3.40 (m, 1H), 2.98-2.88 (m, 1H), 2.80 (d, J=0.9 Hz, 3H), 2.68-2.62 (m, 3H), 2.62-2.53 (m, 2H), 1.97 (dd, J=3.8, 13.7 Hz, 1H), 1.16 (t, J=2.8 Hz, 2H), 1.13-1.06 (m, 1H), 1.04-0.96 (m, 1H)

### Example 17: Synthesis of Compound 207

### Synthesis of Intermediate B36

[chemical structure]

[0256] Into a 50 mL bottles were added 1-tert-butylpiperidin-4-ol (900 mg, 5.723 mmol, 1 equiv) and TEA (868.71 mg, 8.585 mmol, 1.5 equiv) in DCM (9 mL) at room temperature. To the above mixture was added MsCl (786.63 mg, 6.868 mmol, 1.2 equiv) dropwise over 1 min at 0° C. The resulting mixture was stirred for additional 1 h at room temperature. The reaction was quenched with water at room temperature. The reaction was quenched with NaHCO₃ at room temperature. The resulting mixture was extracted with DCM (3×18 mL). The combined organic layers were washed with NaCl solution (2×20 mL), dried over anhydrous Na₂SO₄. After filtration. The resulting mixture was concentrated under reduced pressure. This resulted in 1-tert-butylpiperidin-4-yl methanesulfonate (800 mg, 59%) as a solid. LCMS: (ESI, m/z): 235[M+H]⁺

### Synthesis of Intermediate B37

[chemical structure]

[0257] Into a 50 mL bottles were added 1-tert-butylpiperidin-4-yl methanesulfonate (840 mg, 3.569 mmol, 1.5 equiv) and 5-bromo-7-fluoro-2H-indazole (511.66 mg, 2.379 mmol, 1 equiv) and Cs₂CO₃ (2325.89 mg, 7.138 mmol, 3 equiv) in DMSO (9 mL) at room temperature. The resulting mixture was stirred for additional 16 h at 100° C. The mixture was allowed to cool down to room temperature. The reaction was quenched with H₂O at room temperature. The resulting mixture was extracted with EA (3×20 mL). The combined organic layers were washed with NaCl solution (2×20 mL), dried over anhydrous Na₂SO₄. After filtration, the filtrate was concentrated under reduced pressure. The residue was purified by silica gel column chromatography, eluted with PE/EA (1:1) to afford 5-bromo-2-(1-tert-butylpiperidin-4-yl)-7-fluoroindazole (110 mg) as a solid. LCMS: (ESI, m/z): 353[M+H]⁺

### Synthesis of Compound 207

[chemical structure]

[0258] A solution of 5-bromo-2-(1-tert-butylpiperidin-4-yl)-7-fluoroindazole (90 mg, 0.254 mmol, 1 equiv), Pd(dppf)Cl₂ (20.7 mg, 0.025 mmol, 0.10 equiv), 2,8-dimethylimidazo[1,2-b]pyridazin-6-ylboronic acid (72.78 mg, 0.381 mmol, 1.50 equiv) and K₃PO₄ (134.81 mg, 0.635 mmol, 2.50 equiv) in dioxane (5 mL) and H₂O (1 mL) was stirred for 4 h at 80° C. under nitrogen atmosphere. The mixture was allowed to cool down to room temperature. The resulting mixture was dried over anhydrous Na₂SO₄. After filtration, the filtrate was concentrated under reduced pressure. The residue was purified by silica gel column chromatography, eluted with CH₂Cl₂/MeOH (10:1). The crude product was purified by Chiral-Prep-HPLC (Condition 3, Gradient 1) to afford 2-(1-tert-butylpiperidin-4-yl)-5-{2,8-dimethylimidazo[1,2-b]pyridazin-6-yl}-7-fluoroindazole (26.0 mg, 24%) as a solid. LCMS: (ESI, m/z): 420[M+H]^{+ 1}H NMR: (400 MHz, DMSO-d₆) δ 8.73 (d, J=2.8 Hz, 1H), 8.28 (d, J=1.3 Hz, 1H), 8.04 (d, J=1.0 Hz, 1H), 7.77-7.69 (m, 2H), 4.52 (s, 1H), 3.16 (d, J=11.0 Hz, 2H), 2.60 (d, J=1.1 Hz, 3H), 2.40 (d, J=0.8 Hz, 3H), 2.25 (t, J=11.3 Hz, 2H), 2.16-2.04 (m, 4H), 1.08 (s, 9H).

### Example 18: Synthesis of Compound 104

[chemical structure]

[0259] To a solution of acetaldehyde (3.90 mg, 35.4 umol, 4.97 uL, 40% purity, 1.10 eq) in DCM (1.30 mL) was added dropwise TEA (3.26 mg, 32.1 umol, 4.48 uL, 1 eq) at 15° C. over 5 min. The mixture was stirred at this temperature for 5 min, and then 7-fluoro-5-(7-fluoro-2-methyl-indazol-5-yl)-2-(4-piperidyl)indazole (EVAL-0123-36, 13.0 mg, 32.1 umol, 1 eq, HCl) was added at 15° C. After addition, the mixture was stirred at this temperature for 20 min, and then NaBH(OAc)₃ (13.6 mg, 64.3 umol, 2 eq) was added dropwise at 15° C. The resulting mixture was stirred at 15° C. for 3 hrs. LCMS showed desired MS was detected. The reaction mixture was quenched by addition H₂O (0.5 mL) at 0° C., then diluted with dichloromethane (500 uL) and extracted with dichloromethane (3×500 uL). The combined organic layers were washed with brine (1.00 mL), dried over Na₂SO₄, filtered and concentrated under reduced pressure to give a residue. The residue was purified by prep-HPLC (column: Phenomenex Luna 80*30 mm*3 um; mobile phase: [water(HCl)—CH₃CN]; B %: 1%-30%, 8 min) to give 2-(1-ethyl-4-piperidyl)-7-fluoro-5-(7-fluoro-2-methyl-indazol-5-yl)indazole (EVAL-0123-0004, 4.30 mg, 34%) as a solid. LCMS: (ESI, m/z): 396.3 [M+H]⁺. ¹H NMR (400 MHz, Pyr) δ ppm 8.54 (d, J=2.13 Hz, 1H) 8.35 (d, J=2.38 Hz, 1H) 7.86 (br d, J=7.25 Hz, 2H) 7.64 (br d, J=5.13 Hz, 2H) 4.88 (br s, 1H) 4.16 (s, 3H) 3.38-3.53 (m, 2H) 2.86 (br d, J=4.75 Hz, 6H) 2.56 (br s, 2H) 1.30 (br t, J=7.00 Hz, 3H). ¹⁹F NMR (376 MHz, Pyr) δ ppm −128.583, −128.610.

### Example 19: Synthesis of Compound 105

### Synthesis of Intermediate C3

[chemical structure]

[0260] A mixture of 5-bromo-2H-indazole (1.00 g, 5.08 mmol, 1 eq), tert-butyl 4-bromopiperidine-1-carboxylate (4.02 g, 15.2 mmol, 2 eq), Cs₂CO₃ (8.27 g, 25.3 mmol, 5 eq), KI (1.69 g, 10.1 mmol, 2 eq) in DMF (10.0 mL) was degassed and purged with N₂ for 3 times, and then the mixture was stirred at 100° C. for 12 hrs under N₂ atmosphere. TLC (petroleum ether/ethyl acetate=3/1, Rf=0.27) showed the starting material was consumed and a new major spot was generated. The mixture was filtered and the filtrate was concentrated under reduced pressure. The residue was purified by prep-HPLC (column: Phenomenex C18 75*30 mm*3 um; mobile phase: [water(NH₄HCO₃)—CH₃CN]; B %: 45%-65%, 8 min) to give tert-butyl 4-(5-bromoindazol-2-yl)piperidine-1-carboxylate (100 mg) as a solid LCMS: (ESI, m/z): 324.0, 326.0 [M+H−t-Bu]^{+ 1}H NMR (CDCl₃, 400 MHz) δ ppm 7.90 (s, 1H) 7.82 (d, 1H, J=1.3 Hz) 7.59 (d, 1H, J=9.0 Hz) 7.34 (dd, 1H, J=1.7, 9.2 Hz) 4.55 (tt, 1H, J=4.0, 11.6 Hz) 4.2-4.5 (m, 2H) 2.95 (br t, 2H, J=11.3 Hz) 2.2-2.3 (m, 2H) 2.09 (dq, 2H, J=4.5, 12.2 Hz) 1.49 (s, 9H)

### Synthesis of Intermediate C5

[chemical structure]

[0261] To a solution of tert-butyl 4-(5-bromoindazol-2-yl)piperidine-1-carboxylate (EVAL-0123-24, 100 mg, 262 umol, 1 eq) and 7-fluoro-2-methyl-5-(4,4,5,5-tetramethyl-1,3,2-dioxaborolan-2-yl)indazole (72.6 mg, 262 umol, 1 eq) in dioxane (1.00 mL) was added Pd(dppf)Cl₂ (19.2 mg, 26.3 umol, 0.1 eq) and K₂CO₃ (72.6 mg, 525 umol, 2 eq) under N₂ atmosphere. The mixture was stirred at 80° C. for 2 hrs. TLC (ethyl acetate, Rf=0.44) showed the starting material was consumed and a new major spot was generated. The reaction mixture was cooled to 25° C. and quenched by addition water (10.0 mL) at 25° C., and then extracted with ethyl acetate (3×30.0 mL). The combined organic layers were dried over MgSO₄, filtered and concentrated under reduced pressure to give a residue, which was purified by silica gel column chromatography (petroleum ether/ethyl acetate=1:1) to give tert-butyl 4-[5-(7-fluoro-2-methyl-indazol-5-yl)indazol-2-yl]piperidine-1-carboxylate (20.0 mg, 16.9%) as a solid. LCMS: (ESI, m/z): 450.3 [M+H]^{+ 1}H NMR (CDCl₃, 400 MHz) δ ppm 8.0-8.0 (m, 2H), 7.84 (s, 1H), 7.79 (d, 1H, J=9.2 Hz), 7.6-7.7 (m, 2H), 7.30 (s, 1H), 4.5-4.6 (m, 1H), 4.2-4.4 (m, 5H), 2.9-3.1 (m, 2H), 2.2-2.3 (m, 2H), 2.14 (dq, 2H, J=4.4, 11.9 Hz), 1.50 (s, 9H)

### Synthesis of Compound 105

[chemical structure]

[0262] To a solution of tert-butyl 4-[5-(7-fluoro-2-methyl-indazol-5-yl) indazol-2-yl]piperidine-1-carboxylate (20.0 mg, 44.4 umol, 1 eq) in ethyl acetate (1.00 mL) was added HCl/ethyl acetate (4 M, 1.00 mL) under N₂ atmosphere. The mixture was stirred at 25° C. for 6 hrs. TLC (ethyl acetate, Rf=0.10) showed the starting material was consumed and a new major spot was generated. The reaction mixture was concentrated under reduced pressure to remove ethyl acetate. The crude product was purified by re-crystallization from MeOH (10.0 mL) at 25° C. to give 7-fluoro-2-methyl-5-[2-(4-piperidyl) indazol-5-yl]indazole (EVAL-0123-0003, 17.2 mg, 91.6%) as solid. LCMS: (ESI, m/z): 350.1 [M+H]^{+×1}H NMR (DMSO-d₆, 400 MHz) δ ppm 8.48 (d, 1H, J=2.7 Hz) 8.46 (s, 1H) 8.00 (s, 1H) 7.8-7.8 (m, 1H) 7.7-7.7 (m, 1H) 7.6-7.7 (m, 1H) 7.41 (d, 1H, J=13.3 Hz) 4.8-4.9 (m, 1H) 4.20 (s, 3H) 3.47 (br d, 2H, J=12.8 Hz) 3.1-3.2 (m, 2H) 2.32 (br d, 4H, J=3.4 Hz)

### Example 20: Synthesis of Compound 107

### Synthesis of Intermediate C7

[chemical structure]

[0263] To a solution of 5-bromo-7-fluoro-2-methyl-indazol-6-ol (1.50 g, 6.12 mmol, 1 eq) in DMF (15.0 mL) was added NaH (489 mg, 12.2 mmol, 60% purity, 2 eq) at 0° C. under N₂ protection. The mixture was stirred at 0° C. for 1 hr. Then MOMCl (1.97 g, 24.4 mmol, 1.86 mL, 4 eq) was added to the above mixture at 0° C. under N₂ protection. The mixture was allowed warm to 25° C. and stirred for 1 hr. The reaction was quenched by water (50.0 mL) and the resulting mixture was extracted with ethyl acetate (3×50.0 mL). The combined organic phases were washed with brine (50.0 mL), dried over Na₂SO₄, filtered and filtrate was concentrated under reduced pressure to give 5-bromo-7-fluoro-6-(methoxymethoxy)-2-methyl-indazole (1.60 g, 90%) as a solid. LCMS: (ESI, m/z): 289, 231 [M+H]⁺. ¹H NMR (400 MHz, CDCl₃) δ ppm 7.86 (s, 1H), 7.68 (s, 1H), 5.24 (s, 2H), 4.21 (s, 3H), 3.68 (s, 3H). ¹⁹F NMR (376 MHz, CDCl₃) δ ppm −143.538 (s, 1F)

### Synthesis of Intermediate C8

[chemical structure]

[0264] A mixture of 5-bromo-7-fluoro-6-(methoxymethoxy)-2-methyl-indazole (750 mg, 2.59 mmol, 1 eq) and 4,4,5,5-tetramethyl-2-(4,4,5,5-tetramethyl-1,3,2-dioxaborolan-2-yl)-1,3,2-dioxaborolane (988 mg, 3.89 mmol, 1.5 eq) in dioxane (7.50 mL) was added potassium;acetate (763 mg, 7.78 mmol, 3 eq) and Pd(dppf)Cl₂ (189.82 mg, 259.43 umol, 0.1 eq) under N₂ protection. The mixture was stirred at 100° C. for 1 hr. The reaction mixture was filtered and concentrated under reduced pressure to give 7-fluoro-6-(methoxymethoxy)-2-methyl-5-(4,4,5,5-tetramethyl-1,3,2-dioxaborolan-2-yl)indazole (850 mg, 82.8%) as an oil. The crude product was used directly without any purification. LCMS: (ESI, m/z): 337 [M+H]⁺.

### Synthesis of Intermediate C10

[chemical structure]

[0265] A mixture of 7-fluoro-6-(methoxymethoxy)-2-methyl-5-(4,4,5,5-tetramethyl-1,3,2-dioxaborolan-2-yl)indazole (100 mg, 297 umol, 1 eq) and tert-butyl 4-(5-chloropyrazolo[4,3-b]pyridin-2-yl)piperidine-1-carboxylate (50.1 mg, 148 umol, 0.5 eq) in dioxane (1.50 mL) was added a solution of dipotassium;carbonate (123 mg, 892 umol, 3 eq) in H₂O (300 uL). After purging with N₂ for 3 times, and then cyclopentyl(diphenyl)phosphane;dichloropalladium;iron (21.7 mg, 29.7 umol, 0.1 eq) was added to the above mixture and the mixture was stirred at 100° C. for 1 hr under N₂ atmosphere. The reaction mixture was filtered and concentrated under reduced pressure to give a residue. The residue was purified by column chromatography (SiO₂, petroleum ether/ethyl acetate=10/1 to 0/1) to give tert-butyl 4-[5-[7-fluoro-6-(methoxymethoxy)-2-methyl-indazol-5-yl]pyrazolo [4, 3-b]pyridin-2-yl]piperidine-1-carboxylate (20.0 mg, 13%) as an oil. LCMS: (ESI, m/z): 511 [M+H]⁺.

### Synthesis of Compound 107

[chemical structure]

[0266] A mixture of tert-butyl 4-[5-[7-fluoro-6-(methoxymethoxy)-2-methyl-indazol-5-yl]pyrazolo[4,3-b]pyridin-2-yl]piperidine-1-carboxylate (EVAL-0123-3, 20.0 mg, 39.1 umol, 1 eq) in HCl/EtOAc (1.00 mL, 4M) was stirred at 20° C. for 1 hr. LCMS showed the starting material was consumed completely. The reaction mixture was filtered and the filter cake was concentrated under reduced pressure to give 7-fluoro-2-methyl-5-[2-(4-piperidyl) pyrazolo [4,3-b]pyridin-5-yl]indazol-6-ol (EVAL-0123-0005, 13.0 mg, 82.3%) as a yellow solid. LCMS: (ESI, m/z): 367 [M+H]⁺. ¹H NMR (400 MHz, DMSO-d₆) δ ppm 8.97-9.18 (m, 1H), 8.81-8.94 (m, 2H), 8.51 (d, J=2.5 Hz, 1H), 8.44 (s, 1H), 8.37 (d, J=9.3 Hz, 1H), 8.23 (d, J=9.5 Hz, 1H), 4.83-5.03 (m, 1H), 4.16 (s, 3H), 3.43-3.50 (m, 2H), 3.09-3.22 (m, 2H), 2.34-2.40 (m, 4H). ¹⁹F NMR (400 MHz, DMSO-d₆) δ ppm −157.953 (m, 1F),

### Example 21: Synthesis of Compound 108

### Synthesis of Intermediate C12

[chemical structure]

[0267] A mixture of 5-bromo-7-fluoro-2-methyl-indazole (800 mg, 3.49 mmol, 1 eq), BPD (887 mg, 4.63 mmol, 1.5 eq), KOAc (1.03 g, 10.5 mmol, 3 eq), Pd(dppf)Cl₂ (142 mg, 349 umol, 0.1 eq) in dioxane (6.00 mL) was degassed and purged with N₂ for 3 times, and then the mixture was stirred at 100° C. for 1 hr under N₂ atmosphere. The mixture was filtered and the filtrate was concentrated under reduced pressure to give a residue. The residue was purified by column chromatography (SiO₂, Petroleum ether/Ethyl acetate=10/1 to 1/1) to give 7-fluoro-2-methyl-5-(4,4,5,5-tetramethyl-1,3,2-dioxaborolan-2-yl)indazole (890 mg, 92%) as a solid. LCMS: (ESI, m/z): 277.1 [M+H]⁺. ¹H NMR (400 MHz, CDCl₃) δ ppm 7.89-8.07 (m, 2H) 7.25-7.28 (m, 1H) 4.26 (s, 3H) 1.38 (s, 12H). ¹⁹F NMR (376 MHz, CDCl₃) δ ppm −130.794.

### Synthesis of Intermediate C14

[chemical structure]

[0268] A mixture of 7-fluoro-2-methyl-5-(4,4,5,5-tetramethyl-1,3,2-dioxaborolan-2-yl)indazole (700 mg, 2.54 mmol, 1.1 eq), 5-bromo-7-fluoro-2H-indazole (495 mg, 2.30 mmol, 1 eq), K₂CO₃ (637 mg, 4.61 mmol, 2 eq) and Pd(dppf)Cl₂ (168 mg, 230 umol, 0.1 eq) in dioxane (7.00 mL) and H₂O (700 uL) was degassed and purged with N₂ for 3 times, and then the mixture was stirred at 80° C. for 2 hrs. LCMS showed desired MS was detected. The reaction mixture was filtered and the filtrate was concentrated under reduced pressure to give a residue. The residue was purified by column chromatography (SiO₂, Petroleum ether/Ethyl acetate=1/0 to 1/1) to give 7-fluoro-5-(7-fluoro-2H-indazol-5-yl)-2-methyl-indazole (EVAL-0123-26, 210 mg, 32.0%) as a solid. LCMS: (ESI, m/z): 285.1 [M+H]⁺. ¹H NMR (400 MHz, CDCl₃) δ ppm 10.03-10.53 (m, 1H) 8.17 (d, J=3.30 Hz, 1H) 8.01 (d, J=2.57 Hz, 1H) 7.74 (d, J=1.10 Hz, 1H) 7.62 (d, J=1.22 Hz, 1H) 7.39 (dd, J=11.92, 1.16 Hz, 1H) 6.65-6.75 (m, 1H) 4.29 (s, 3H). ¹⁹F NMR (376 MHz, CDCl₃) δ ppm −126.56, −128.35, −131.73

### Synthesis of Intermediate C16

[chemical structure]

[0269] A mixture of 7-fluoro-5-(7-fluoro-2H-indazol-5-yl)-2-methyl-indazole (50.0 mg, 175 umol, 1 eq), tert-butyl 7-(p-tolylsulfonyloxy)-4-azaspiro[2.5]octane-4-carboxylate (201 mg, 527 umol, 3 eq), K₂CO₃ (72.9 mg, 527 umol, 3 eq) in DMF (500 uL) was degassed and purged with N₂ for 3 times, and then the mixture was stirred at 80° C. for 12 hrs under N₂ atmosphere The reaction mixture was quenched by addition H₂O (20.0 mL) at 0° C., and then diluted with ethyl acetate (3.00 mL) and extracted with ethyl acetate (3×4.00 mL). The combined organic layers were washed with brine (3×4.00 mL), dried over Na₂SO₄, filtered and concentrated under reduced pressure to give a residue. The residue was purified by prep-HPLC (column: Waters Xbridge Prep OBD C18 150*40 mm*10 um; mobile phase: [water(NH₄HCO₃)—CH₃CN]; B %: 50%-70%, 8 min) to give tert-butyl 7-[7-fluoro-5-(7-fluoro-2-methyl-indazol-5-yl)indazol-2-yl]-4-azaspiro[2.5]octane-4-carboxylate (17.0 mg, 13.9%) as a solid. LCMS: (ESI, m/z): 494.2 [M+H]⁺. ¹H NMR (400 MHz, CDCl₃) δ ppm 8.04 (d, J=2.03 Hz, 1H), 8.00 (d, J=2.62 Hz, 1H), 7.69 (d, J=1.19 Hz, 1H), 7.61 (d, J=1.19 Hz, 1H), 7.34 (dd, J=13.47, 1.19 Hz, 1H), 7.24 (dd, J=12.40, 1.19 Hz, 1H), 5.03-5.18 (m, 1H), 4.21-4.36 (m, 4H), 3.10 (br t, J=12.99 Hz, 1H), 2.69 (br t, J=12.40 Hz, 1H), 2.23-2.41 (m, 1H), 2.12 (br dd, J=12.93, 1.73 Hz, 1H), 1.52 (s, 9H), 1.33-1.45 (m, 2H), 0.85-0.99 (m, 1H), 0.57-0.73 (m, 2H). ¹⁹F NMR (400 MHz, CDCl₃) δ ppm −128.430.

### Synthesis of Compound 108

[chemical structure]

[0270] A mixture of tert-butyl 7-[7-fluoro-5-(7-fluoro-2-methyl-indazol-5-yl)indazol-2-yl]-4-azaspiro[2.5]octane-4-carboxylate (15.0 mg, 30.3 umol, 1 eq) in HCl/MeOH (4 M, 1.52 mL, 2. eq) was degassed and purged with N₂ for 3 times, and then the mixture was stirred at 15° C. for 4 hrs under N₂ atmosphere. The reaction mixture was concentrated under reduced pressure to remove solvent. The residue was purified by prep-HPLC (column: Phenomenex Luna 80*30 mm*3 um; mobile phase: [water(HCl)—CH₃CN]; B %: 1%-50%, 8 min) to give 2-(4-azaspiro[2.5]octan-7-yl)-7-fluoro-5-(7-fluoro-2-methyl-indazol-5-yl)indazole (EVAL-0123-28, 7.92 mg, 61%) as a solid. LCMS: (ESI, m/z): 394.0 [M+H]⁺. ¹H NMR (400 MHz, MeOD-d₄) δ ppm 8.46 (d, J=2.63 Hz, 1H) 8.34 (d, J=2.63 Hz, 1H) 7.77 (dd, J=3.25, 1.25 Hz, 2H) 7.38 (ddd, J=12.95, 8.69, 1.38 Hz, 2H) 5.02-5.09 (m, 1H) 4.26 (s, 3H) 3.61-3.70 (m, 1H) 3.42 (br dd, J=7.38, 2.75 Hz, 1H) 2.84-2.97 (m, 1H) 2.46-2.63 (m, 2H) 1.95 (dd, J=14.07, 3.69 Hz, 1H) 1.13-1.22 (m, 2H) 0.96-1.12 (m, 2H). ¹⁹F NMR (376 MHz, MeOD-d₄) δ ppm −131.198, −131.239.

### Example 22: Synthesis of Compound 110

### Synthesis of Intermediate C18

[chemical structure]

[0271] To a mixture of 4,4,5,5-tetramethyl-2-(4,4,5,5-tetramethyl-1,3,2-dioxaborolan-2-yl)-1,3,2-dioxaborolane (210 mg, 829 umol, 1.5 eq), 5-bromo-6-(methoxymethoxy)-2-methyl-indazole (150 mg, 553 umol, 1 eq) and cyclopentyl(diphenyl)phosphane;dichloromethane;dichloro palladium;iron (45.1 mg, 55.3 umol, 0.1 eq) in 1,4-dioxane (2.00 mL) was added potassium acetate (162 mg, 1.66 mmol, 3.0 eq) under nitrogen atmosphere. The resulting mixture was stirred at 100° C. for 1 hr. The reaction mixture was diluted with ethyl acetate (30.0 mL) and filtered, the filtrate was concentrated under reduced pressure to give 6-(methoxymethoxy)-2-methyl-5-(4,4,5,5-tetramethyl-1,3,2-dioxaborolan-2-yl)indazole (300 mg) as a solid. The crude product was used directly in the next step without further purification. LCMS: (ESI, m/z): 319.1 [M+H]⁺.

### Synthesis of Intermediate C20

[chemical structure]

[0272] To a mixture of tert-butyl 4-(5-chloropyrazolo[4,3-b]pyridin-2-yl)piperidine-1-carboxylate (185 mg, 550 umol, 1.00 eq), 6-(methoxymethoxy)-2-methyl-5-(4,4,5,5-tetramethyl-1,3,2-dioxaborolan-2-yl)indazole (175 mg, 0.550 mmol, 1 eq) and K₂CO₃ (228 mg, 1.65 mmol, 3.0 eq) in 1,4-dioxane (2.00 mL) and H₂O (500 uL) was added ditert-butyl(cyclopentyl)phosphane;dichloropalladium;iron (35.8 mg, 55.0 umol, 0.1 eq) under nitrogen atmosphere. The resulting mixture was stirred for 2 hrs at 80° C. The reaction mixture was cooled to 20° C. and quenched with water (30.0 mL), the mixture was extracted with ethyl acetate (5×10.0 mL). The organic layer was dried over Na₂SO₄, filtered and the filtrate was concentrated under reduced pressure. The reaction mixture was purified by prep-TLC (SiO₂, ethyl acetate:methanol=10:1) to give tert-butyl 4-(5-(6-(methoxymethoxy)-2-methyl-2H-indazol-5-yl)-2H-pyrazolo[4,3-b]pyridin-2-yl)piperidine-1-carboxylate (40.0 mg, 14.7% yield) as a solid. LCMS: (ESI, m/z): 493.2 [M+H]⁺. ¹H NMR (400 MHz, CDCl₃) δ ppm 8.25 (s, 1H) 8.03 (d, J=9.2 Hz, 1H) 7.92 (s, 1H) 7.88 (s, 1H) 7.66 (d, J=9.0 Hz, 1H) 7.38 (s, 1H), 5.23 (s, 2H) 4.61 (tt, J=4.0, 11.5 Hz, 1H) 4.45-4.29 (m, 2H) 4.20 (s, 3H) 3.44 (s, 3H) 3.07-2.90 (m, 2H) 2.33-2.22 (m, 2H) 2.21-2.11 (m, 2H) 1.50 (s, 9H)

### Synthesis of Compound 110

[chemical structure]

[0273] To a solution of tert-butyl 4-[5-[6-(methoxymethoxy)-2-methyl-indazol-5-yl]pyrazolo [4,3-b]pyridin-2-yl]piperidine-1-carboxylate (008-3, 40.0 mg, 81.2 umol, 1 eq) in DCM (2.00 mL) was added the solution of HCl/dioxane (2 M, 2.00 mL) at 25° C. for 2 hrs. The reaction mixture was filtered. The filter cake was triturated with ethyl acetate (10.0 mL) at 25° C. for 60 min to give 2-methyl-5-[2-(4-piperidyl)pyrazolo[4,3-b]pyridin-5-yl]indazol-6-ol (22.1 mg, 70.9%) as a solid. LCMS: (ESI, m/z): 349.1 [M+H]⁺. ¹H NMR (400 MHz, MeOD-d₄) δ ppm 8.99 (s, 1H) 8.93 (d, J=9.17 Hz, 1H) 8.80 (s, 1H) 8.52 (s, 1H) 8.24 (d, J=9.17 Hz, 1H) 7.19 (s, 1H) 5.14-5.33 (m, 1H) 4.35 (s, 3H) 3.62-3.79 (m, 2H) 3.34-3.47 (m, 2H) 2.50-2.70 (m, 4H)

### Example 23: Synthesis of Compound 114

### Synthesis of Intermediate C22

[chemical structure]

[0274] To a solution of 6-bromo-5-methoxy-2,4-dimethyl-1,3-benzoxazole (300 mg, 1.17 mmol, 1 eq) in dioxane (6.00 mL) were added 4,4,5,5-tetramethyl-2-(4,4,5,5-tetramethyl-1,3,2-dioxaborolan-2-yl)-1,3,2-dioxaborolane (446 mg, 1.76 mmol, 1.5 eq), KOAc (344 mg, 3.51 mmol, 3 eq) and Pd(dppf)Cl₂ (85.7 mg, 117 umol, 0.1 eq). The reaction was stirred at 100° C. for 1 hr. The reaction mixture was filtered and concentrated under reduced pressure to give a residue. The residue was purified column chromatographed on silica gel eluted with petroleum ether/ethyl acetate (10/1 to 3/1) to give 5-methoxy-2,4-dimethyl-6-(4,4,5,5-tetramethyl-1,3,2-dioxaborolan-2-yl)-1,3-benzoxazole (150 mg, 42.2%) as a solid. ¹H NMR (400 MHz, CDCl₃) δ ppm 7.65 (s, 1H) 3.80 (s, 3H) 2.64 (s, 3H) 2.50 (s, 3H) 1.39 (s, 12H)

### Synthesis of Intermediate C24

[chemical structure]

[0275] To a solution of tert-butyl 4-(5-bromotriazolo[4,5-b]pyridin-2-yl)piperidine-1-carboxylate (253 mg, 663 umol, 1.5 eq) in dioxane (2.80 mL) were added 5-methoxy-2,4-dimethyl-6-(4,4,5,5-tetramethyl-1,3,2-dioxaborolan-2-yl)-1,3-benzoxazole (134 mg, 442 umol, 1 eq) and KOAc (130 mg, 1.33 mmol, 3 eq) and ditert butyl(cyclopentyl)phosphane;dichloropalladium;iron (28.8 mg, 44.2 umol, 0.1 eq). The reaction mixture was stirred at 120° C. for 12 hrs. The reaction mixture was filtered and concentrated under reduced pressure. The residue was purified column chromatographed on silica gel eluted with petroleum ether/ethyl acetate (10/1 to 3/1) to give tert-butyl 4-[5-(5-methoxy-2,4-dimethyl-1,3-benzoxazol-6-yl)triazolo[4,5-b]pyridin-2-yl]piperidine-1-carboxylate (90.0 mg, 42.5%) as a solid. LCMS: (ESI, m/z): 479.3 [M+H]⁺.

### Synthesis of Compound 114

[chemical structure]

[0276] To a solution of tert-butyl 4-[5-(5-methoxy-2, 4-dimethyl-1, 3-benzoxazol-6-yl) triazolo [4, 5-b]pyridin-2-yl]piperidine-1-carboxylate (80.0 mg, 167 umol, 1 eq) in DCM (8.00 mL) were added BCl₃ (1 M in DCM, 501 uL, 3 eq). The reaction was stirred at 40° C. for 5 hrs. The reaction mixture was filtered and the filter cake was purified by Prep-HPLC (column: Phenomenex C18 75*30 mm*3 um; mobile phase: [water(HCl)—CH₃CN]; B %: 5%-55%, 8 min) to give 5-methoxy-2,4-dimethyl-6-[2-(4-piperidyl)triazolo[4,5-b]pyridin-5-yl]-1,3-benzoxazole (1.95 mg, 3%) as a solid. LCMS: (ESI, m/z): 365.0 [M+H]⁺. ¹H NMR (400 MHz, MeOD-d₄) δ ppm 8.48 (d, J=9.1 Hz, 1H) 8.27 (d, J=9.4 Hz, 1H) 8.17 (s, 1H) 5.13-5.00 (m, 1H) 3.30 (br s, 2H) 3.02-2.89 (m, 2H) 2.65 (s, 3H) 2.49 (s, 3H) 2.45-2.28 (m, 4H).

### Example 24: Synthesis of Compound 113

### Synthesis of Intermediate C26

[chemical structure]

[0277] To a solution of H₂SO₄ (64.0 mL) in H₂O (214 mL) were added 6-bromopyridine-2, 3-diamine (5.00 g, 26.6 mmol, 1 eq) at 5° C. The reaction was stirred for 0.5 hr at this temperature. Then, a solution of NaNO₂ (2.16 g, 31.38 mmol, 1.18 eq) in H₂O (64.0 mL) was added and the reaction mixture was stirred at 25° C. for 16 hrs. TLC (petroleum ether/ethyl acetate=1/1, Rf=0.5) showed all of the starting material was consumed and a new major spot was generated. The reaction mixture was filtered and the filter cake was washed with water and then dry under vacuum to give 5-bromo-2H-triazolo [4, 5-b]pyridine (3.00 g, 57%) as a solid. LCMS: (ESI, m/z): 198.9, 209.9 [M+H]⁺. ¹H NMR (400 MHz, MeOD-d₄) δ ppm 8.27 (d, J=8.6 Hz, 1H) 7.66 (d, J=8.6 Hz, 1H).

### Synthesis of Intermediate C28

[chemical structure]

[0278] To a solution of 5-bromo-2H-triazolo [4, 5-b]pyridine (3.00 g, 15.0 mmol, 1 eq) in DMF (40.0 mL) were added tert-butyl 4-bromopiperidine-1-carboxylate (7.97 g, 30.1 mmol, 2 eq), KI (5.00 g, 30.1 mmol, 2 eq) and Cs₂CO₃ (24.5 g, 75.3 mmol, 5 eq). The reaction was stirred at 100° C. for 12 hrs. TLC (petroleum ether/ethyl acetate=1/1, Rf=0.8) showed all of the starting material was consumed and a new major spot was generated. The reaction solution was filtered and the filtrate and concentrated. The residue was purified by Prep-HPLC (column: Phenomenex luna C18 80*40 mm*3 um; mobile phase: [water(HCl)—CH₃CN]; B %: 40%-80%, 7 min) to give tert-butyl 4-(5-bromotriazolo[4,5-b]pyridin-2-yl)piperidine-1-carboxylate (2.40 g, 41.6%) as white solid. LCMS: (ESI, m/z): 326.0, 328.0 [M+H−tBu]⁺. ¹H NMR (400 MHz, CDCl₃) δ ppm 8.09 (d, J=8.7 Hz, 1H) 7.56-7.45 (m, 1H) 5.02-4.86 (m, 1H) 4.35-4.13 (m, 2H) 3.15-2.98 (m, 2H) 2.40-2.18 (m, 4H) 1.50 (s, 9H).

### Synthesis of Intermediate C30

[chemical structure]

[0279] To a solution of 6-(methoxymethoxy)-2,7-dimethyl-5-(4,4,5,5-tetramethyl-1,3,2-dioxaborolan-2-yl)indazole (50.0 mg, 150 umol, 1 eq) in dioxane (2.00 mL) were added tert-butyl 4-(5-bromotriazolo[4,5-b]pyridin-2-yl)piperidine-1-carboxylate (86.3 mg, 225 umol, 1.5 eq), KOAc (44.2 mg, 451 umol, 3 eq) and ditert-butyl(cyclopentyl)phosphane;dichloropalladium;iron (9.81 mg, 15.0 umol, 0.1 eq). The reaction was stirred at 100° C. for 12 hrs. The reaction mixture was filtered and the filtrate was concentrated to give tert-butyl 4-[5-(6-hydroxy-2,7-dimethyl-indazol-5-yl)triazolo[4,5-b]pyridin-2-yl]piperidine-1-carboxylate (40.0 mg, 13.0%) as an oil. The crude product was used directly in next step without any purification. LCMS: (ESI, m/z): 508.3 [M+H]⁺

### Synthesis of Compound 113

[chemical structure]

[0280] To the crude tert-butyl 4-[5-(6-hydroxy-2, 7-dimethyl-indazol-5-yl) triazolo[4, 5-b] pyridin-2-yl]piperidine-1-carboxylate (40.0 mg, 80.0 umol, 1 eq) was added HCl/dioxane (2.00 mL) and the mixture was stirred at 25° C. for 1 hr. The reaction mixture was filtered and concentrated under reduced pressure. The residue was purified by Prep-HPLC (column: Phenomenex luna C18 80*40 mm*3 um; mobile phase: [water(HCl)—CH₃CN]; B %: 30%-80%, 7 min) to give 2,7-dimethyl-5-[2-(4-piperidyl)triazolo[4,5-b]pyridin-5-yl]indazol-6-ol (11.2 mg) as a solid. LCMS: (ESI, m/z): 364.1 [M+H]⁺. ¹H NMR (400 MHz, MeOD-d₄) δ ppm 8.85 (s, 1H) 8.76 (s, 1H) 8.61 (d, J=9.4 Hz, 1H) 8.42 (d, J=9.4 Hz, 1H) 5.32-5.37 (m, 1H) 4.35 (s, 3H) 3.64 (td, J=4.1, 13.2 Hz, 2H) 3.47-3.35 (m, 2H) 2.78-2.55 (m, 4H) 2.49 (s, 3H).

### Example 25: Synthesis of Compound 115

### Synthesis of Intermediate C32

[chemical structure]

[0281] To a solution of tert-butyl 4-(7-fluoro-2H-indazol-5-yl)-3,6-dihydro-2H-pyridine-1-carboxylate (40.0 mg, 126 umol, 1 eq) in MeOH (4.00 mL) was added Pd/C (29.7 mg, 12.6 umol, 5% purity, 0.1 eq) under N₂ atmosphere. The suspension was degassed and purged with H₂ for 3 times. The mixture was stirred under H₂ (15 Psi) at 25° C. for 12 hrs. TLC (petroleum ether/ethyl acetate=3/1, Rf=0.38) showed the starting material was consumed and a new major spot was generated. After filtration via filter Celite pad, the organic layer was concentrated under reduced pressure to afford tert-butyl 4-(7-fluoro-2H-indazol-5-yl)piperidine-1-carboxylate (600 mg, 59.6%) as an oil. LCMS: (ESI, m/z): 264.0 [M+H−tBu]^{+ 1}H NMR (METHANOL-d₄, 400 MHz) δ ppm 7.99-8.12 (1H, m), 7.39-7.62 (1H, m), 7.06 (1H, d, J=12.3 Hz), 4.23 (2H, br d, J=13.4 Hz), 2.76-2.97 (3H, m), 1.89 (2H, br d, J=12.5 Hz), 1.63 (2H, qd, J=12.6 Hz, J=4.3 Hz), 1.49 (s, 9H)

### Synthesis of Intermediate C34

[chemical structure]

[0282] A mixture of tert-butyl 4-(7-fluoro-2H-indazol-5-yl)piperidine-1-carboxylate (50.0 mg, 156 umol, 1 eq), 5-bromo-2,7-dimethyl-indazole (35.2 mg, 156 umol, 1 eq), dimethyl glycine (16.1 mg, 156 umol, 1 eq), iodocopper;tetrabutylammonium;diiodide (175 mg, 156 umol, 1 eq) in dioxane (2.00 mL) was degassed and purged with N₂ for 3 times, and then the mixture was stirred at 120° C. for 8 hrs under N₂ atmosphere. TLC (petroleum ether/ethyl acetate=3/1, Rf=0.38) showed the starting material was consumed and a major new spot was generated. After filtration via filter celite pad, the organic layer was concentrated under reduced pressure evaporated to dryness to afford a residue. The residue was purified by prep-HPLC (column: Phenomenex C18 75*30 mm*3 um; mobile phase: [water(NH₄HCO₃)—CH₃CN]; B %: 40%-70%, 8 min) to give tert-butyl 4-[2-(2,7-dimethylindazol-5-yl)-7-fluoro-indazol-5-yl]piperidine-1-carboxylate (16.0 mg, 19.8%) as a solid. LCMS: (ESI, m/z): 464.2 [M+H]^{+ 1}H NMR (CHLOROFORM-d, 400 MHz) δ ppm 8.40 (1H, d, J=2.4 Hz), 8.00 (2H, d, J=8.4 Hz), 7.64 (1H, s), 7.37 (1H, br s), 6.87 (1H, d, J=12.6 Hz), 4.29 (5H, s), 2.78-2.92 (2H, m), 2.66-2.77 (4H, m), 1.91 (2H, br d, J=12.5 Hz), 1.60-1.74 (2H, m), 1.49-1.52 (9H, m)

### Synthesis of Compound 115

[chemical structure]

[0283] To a solution of tert-butyl 4-[2-(2, 7-dimethylindazol-5-yl)-7-fluoro-indazol-5-yl] piperidine-1-carboxylate (16.0 mg, 34.5 umol, 1 eq) in EtOAc (500 uL) was added HCl/EtOAc (4 M, 1.23 mL) under N₂ atmosphere. The mixture was stirred at 25° C. for 12 hrs. TLC (petroleum ether/ethyl acetate=1/1, Rf=0.01) showed the starting material was consumed and a new major spot was generated. The reaction mixture was concentrated under reduced pressure to remove ethyl acetate. The crude product was purified by re-crystallization from MeOH (10.0 mL) at 25° C. to give 2-(2,7-dimethylindazol-5-yl)-7-fluoro-5-(4-piperidyl)indazole (13.4 mg, 95.9%, HCl) as a solid. LCMS: (ESI, m/z): 364.1 [M+H]^{+ 1}H NMR (MeOD-d₄, 400 MHz) δ ppm 8.88 (d, 1H, J=2.7 Hz), 8.59 (s, 1H) 8.22 (d, 1H, J=1.5 Hz) 7.92 (d, 1H, J=0.7 Hz) 7.50 (s, 1H) 7.05 (d, 1H, J=12.6 Hz) 4.36 (s, 3H) 3.56 (br d, 2H, J=12.7 Hz) 3.1-3.3 (m, 2H) 3.0-3.1 (m, 1H) 2.7-2.8 (m, 3H) 2.20 (br d, 2H, J=13.6 Hz) 1.9-2.1 (m, 2H) ¹⁹F NMR (MeOD-d₄, 376 MHz) δ ppm −130.491 (s, 1F)

### Example 26: Synthesis of Compound 117

### Synthesis of Intermediate C36

[chemical structure]

[0284] A mixture of 5-bromo-7-fluoro-2H-indazole (1.00 g, 4.65 mmol, 1 eq), SEM-C₁ (852 mg, 5.12 mmol, 905 μL, 1.1 eq), K₂CO₃ (964 mg, 6.98 mmol, 1.5 eq) in THE (10.0 mL) was degassed and purged with N₂ for 3 times, and then the mixture was stirred at 25° C. for 12 hrs under N₂ atmosphere. TLC (petroleum ether/ethyl acetate=4/1, Rf=0.60) showed the starting material was consumed and a new major spot was generated. The reaction mixture was quenched by addition H₂O at 25° C., and then diluted with EtOAc (10.0 mL) and extracted with ethyl acetate (3×30.0 mL). The combined organic layers were dried over Na₂SO₄, filtered and concentrated under reduced pressure. The residue was triturated with methyl tert-butyl ether (5.00 mL). to afford 2-[(5-bromo-7-fluoro-indazol-2-yl)methoxy]ethyl-trimethyl-silane (900 mg, 50.4%) as yellow solid. LCMS: (ESI, m/z): 345.0, 347.0 [M+H]^{+ 1}H NMR (CDCl₃, 400 MHz) δ ppm 7.91-8.25 (m, 1H) 7.62-7.78 (m, 1H) 7.11-7.36 (m, 1H) 4.63-5.89 (m, 2H) 3.52-3.77 (m, 2H) 0.80-1.08 (m, 2H) 0.02-0.04 (m, 9H)

### Synthesis of Intermediate C37

[chemical structure]

[0285] A mixture of 2-[(5-bromo-7-fluoro-indazol-2-yl)methoxy]ethyl-trimethyl-silane (900 mg, 2.61 mmol, 1 eq), tert-butyl piperazine-1-carboxylate (631 mg, 3.39 mmol, 1.3 eq), t-BuONa (500 mg, 5.21 mmol, 2 eq), dicyclohexyl-[2-(2,4,6-triisopropylphenyl)phenyl]phosphane (248 mg, 521 umol, 0.2 eq) and tris(dibenzylideneacetone)dipalladium (238 mg, 260 umol, 0.1 eq) in toluene (10.0 mL) was degassed and purged with N₂ for 3 times, and then the mixture was stirred at 80° C. for 12 hrs under N₂ atmosphere. TLC (petroleum ether/ethyl acetate=3/1, Rf=0.73) showed the starting material was consumed and a new major spot was generated. The reaction mixture was quenched by addition H₂O (30.0 mL) at 25° C., and then diluted with EtOAc (10.0 mL) and extracted with ethyl acetate (3×30.0 mL). The combined organic layers were dried over Na₂SO₄, filtered and concentrated under reduced pressure to give a residue. After filtration via filter celite pad, the organic layer was concentrated under reduced pressure to afford tert-butyl 4-[7-fluoro-2-(2-trimethylsilylethoxymethyl) indazol-5-yl]piperazine-1-carboxylate (900 mg, 77%) as a solid. LCMS: (ESI, m/z): 451.2 [M+H]^{+ 1}H NMR (CHLOROFORM-d, 400 MHz) δ ppm 7.91-8.04 (1H, m), 6.69-6.95 (2H, m), 5.66-5.81 (2H, m), 3.61 (4H, br t, J=5.0 Hz), 3.05-3.13 (4H, m), 1.50 (9H, s), 1.26-1.29 (2H, m), 0.95 (2H, dd, J=7.5 Hz, J=3.6 Hz), −0.08-0.02 (9H, m)

### Synthesis of Intermediate C38

[chemical structure]

[0286] A mixture of tert-butyl 4-[7-fluoro-2-(2-trimethylsilylethoxymethyl)indazol-5-yl]piperazine-1-carboxylate (50.0 mg, 110 umol, 1 eq) and TBAF (1 M, 554 μL, 5 eq) in THE (500 uL) was degassed and purged with N₂ for 3 times, and then the mixture was stirred at 80° C. for 12 hrs under N₂ atmosphere. TLC (petroleum ether/ethyl acetate=3/1, Rf=0.30) showed the starting material was consumed and a new major spot was generated. The reaction mixture was quenched by addition H₂O (20.0 mL) at 25° C. and extracted with ethyl acetate (3×100 mL). The combined organic layers were dried over Na₂SO₄, filtered and concentrated under reduced pressure to give a residue. The residue was purified by column chromatography (SiO₂, Petroleum ether/Ethyl acetate=5/1 to 2/1) to give tert-butyl 4-(7-fluoro-2H-indazol-5-yl) piperazine-1-carboxylate (300 mg, 42.2%) as a solid. LCMS: (ESI, m/z): 321.1 [M+H]^{+ 1}H NMR (CDCl₃, 400 MHz) δ ppm 9.8-10.7 (m, 1H) 8.00 (d, 1H, J=3.4 Hz) 6.8-7.0 (m, 2H) 3.5-3.7 (m, 4H) 3.0-3.2 (m, 4H) 1.50 (s, 9H)

### Synthesis of Intermediate C40

[chemical structure]

[0287] A mixture of tert-butyl 4-(7-fluoro-2H-indazol-5-yl)piperazine-1-carboxylate (100 mg, 312 umol, 1.5 eq), 5-bromo-2,7-dimethyl-indazole (46.8 mg, 208 umol, 1 eq), Cu₂O (2.98 mg, 20.8 umol, 2.13 uL, 0.1 eq), N,N [symbol] bis(2-furylmethyl)oxamide (5.17 mg, 20.8 umol, 0.1 eq), K₃PO₄ (88.3 mg, 416 umol, 2 eq) in DMSO (2.00 mL) was degassed and purged with N₂ for 3 times, and then the mixture was stirred at 120° C. for 8 hrs under N₂ atmosphere. The reaction mixture was quenched by addition water (10.0 mL) at 25° C., and then extracted with ethyl acetate (3×15.0 mL). The combined organic layers were dried over Na₂SO₄, filtered and concentrated under reduced pressure to give a residue. The residue was purified by prep-HPLC (column: Phenomenex C18 75*30 mm*3 um; mobile phase: [water(NH₄HCO₃)—CH₃CN]; B %: 40%-70%, 8 min) to give tert-butyl 4-[2-(2,7-dimethylindazol-5-yl)-7-fluoro-indazol-5-yl]piperazine-1-carboxylate (10.0 mg, 9.83%) as a solid. LCMS: (ESI, m/z): 465.2 [M+H]^{+ 1}H NMR (CDCl₃, 400 MHz) δ ppm 8.31 (d, 1H, J=2.7 Hz) 8.00 (s, 1H) 7.95 (d, 1H, J=1.3 Hz) 7.64 (d, 1H, J=0.9 Hz) 6.85 (dd, 1H, J=1.8, 13.3 Hz) 6.75 (d, 1H, J=1.7 Hz) 4.2-4.4 (m, 3H) 3.6-3.7 (m, 4H) 3.0-3.2 (m, 4H) 2.72 (s, 3H) 1.51 (s, 9H) ¹⁹F NMR (CDCl₃, 376 MHz) δ ppm −127.29 (s, 1F)

### Synthesis of Compound 117

[chemical structure]

[0288] To a solution of tert-butyl 4-[2-(2,7-dimethylindazol-5-yl)-7-fluoro-indazol-5-yl]piperazine-1-carboxylate (10.0 mg, 21.5 umol, 1 eq) in ethyl acetate (500 uL) was added HCl/EtOAc (4 M, 1.00 mL) under N₂ atmosphere. The mixture was stirred at 25° C. for 12 hrs. TLC (petroleum ether/ethyl acetate=1/1, Rf=0.01) showed the starting material was consumed and a new major spot was generated. The reaction mixture was concentrated under reduced pressure to remove ethyl acetate. The crude product was purified by re-crystallization from MeOH (5.00 mL) at 25° C. to give 2-(2,7-dimethylindazol-5-yl)-7-fluoro-5-piperazin-1-yl-indazole (6.55 mg, 73.9%, HCl) as a solid. LCMS: (ESI, m/z): 365.1 [M+H]^{+ 1}H NMR (DMSO-d₆, 400 MHz) δ ppm 8.90 (d, 1H, J=2.8 Hz) 8.44 (s, 1H) 8.11 (s, 1H) 7.72 (s, 1H) 7.12 (d, 1H, J=12.4 Hz) 6.88 (s, 1H) 4.19 (s, 3H) 3.30-3.32 (m, 4H) 3.24-3.28 (m, 4H) 2.59 (s, 3H) ¹⁹F NMR (MeOD-d₄, 376 MHz) δ ppm −129.37 (s, 1F).

### Example 27: Synthesis of Compound 119

### Synthesis of Intermediate C43

[chemical structure]

[0289] A mixture of tert-butyl 4-(7-fluoro-2H-indazol-5-yl)piperazine-1-carboxylate (100 mg, 312 umol, 1.5 eq), 6-bromo-2,4-dimethyl-1,3-benzoxazole (47.0 mg, 208 umol, 1 eq), N,N [symbol] bis(2-furylmethyl)oxamide (5.17 mg, 20.8 umol, 0.1 eq), Cu₂O (2.98 mg, 20.8 umol, 2.13 uL, 0.1 eq), K₃PO₄ (88.3 mg, 416 umol, 2 eq) in DMSO (2.00 mL) was degassed and purged with N₂ for 3 times, and then the mixture was stirred at 120° C. for 8 hrs under N₂ atmosphere. LC-MS showed the starting material was consumed. Several new peaks were shown on LC-MS and 73% of desired compound was detected. The reaction mixture was quenched by addition water (10.0 mL) at 25° C., and then diluted with ethyl acetate (10.0 mL) and extracted with ethyl acetate (3×5.00 mL). The combined organic layers were washed with brine (5.00 mL), dried over Na₂SO₄, filtered and concentrated under reduced pressure to give a residue. The residue was purified by prep-HPLC (column: Phenomenex C18 75*30 mm*3 um; mobile phase: [water(NH₄HCO₃)—CH₃CN]; B %: 40%-70%, 8 min) to give tert-butyl 4-[2-(2,4-dimethyl-1,3-benzoxazol-6-yl)-7-fluoro-indazol-5-yl]piperazine-1-carboxylate (10.0 mg, 9.29%) as a solid. LCMS: (ESI, m/z): 466.2 [M+H]^{+ 1}H NMR (CDCl₃, 400 MHz) δ ppm 8.31 (d, 1H, J=2.6 Hz) 7.86 (d, 1H, J=1.8 Hz) 7.68 (s, 1H) 6.86 (dd, 1H, J=1.7, 13.3 Hz) 6.73 (d, 1H, J=1.6 Hz) 3.6-3.7 (m, 4H) 3.1-3.1 (m, 4H) 2.69 (d, 6H, J=6.4 Hz) 1.51 (s, 9H).

### Synthesis of Compound 119

[chemical structure]

[0290] To a solution of tert-butyl 4-[2-(2,4-dimethyl-1,3-benzoxazol-6-yl)-7-fluoro-indazol-5-yl]piperazine-1-carboxylate (10.0 mg, 21.5 umol, 1 eq) in ethyl acetate (500 uL) was added HCl/ethyl acetate (4 M, 1.00 mL) under N₂ atmosphere. The mixture was stirred at 25° C. for 12 hrs.

[0291] TLC (petroleum ether/ethyl acetate=1/1, Rf=0.01) showed the starting material was consumed and a new major spot was generated. The reaction mixture was concentrated under reduced pressure. The crude product was purified by re-crystallization from MeOH (10.0 mL) at 25° C. to give 6-(7-fluoro-5-piperazin-1-yl-indazol-2-yl)-2,4-dimethyl-1,3-benzoxazole (7.55 mg, 96%) as a solid. LCMS: (ESI, m/z): 366.1 [M+H]^{+ 1}H NMR (MeOD-d₄, 400 MHz) δ ppm 8.76 (d, 1H, J=2.6 Hz) 8.02 (d, 1H, J=1.6 Hz) 7.82 (d, 1H, J=1.0 Hz) 7.05 (d, 1H, J=13.6 Hz) 6.97 (d, 1H, J=1.8 Hz) 3.42 (s, 8H) 2.69 (s, 3H) 2.66 (s, 3H) ¹⁹F NMR (MeOD-d₄, 376 MHz) δ ppm −129.308 (s, 1F)

### Example 28: Synthesis of Compound 120

### Synthesis of Intermediate C46

[chemical structure]

[0292] To a solution of tert-butyl 4-(7-fluoro-2H-indazol-5-yl)piperidine-1-carboxylate (E100 mg, 313 umol, 1 eq) in DMSO (2.00 mL) was added t-BuOK (70.2 mg, 626 umol, 2 eq) and 6-chloro-2,8-dimethyl-imidazo[1,2-b]pyridazine (56.8 mg, 313 umol, 1 eq). The reaction mixture was quenched by addition water (10.0 mL) at 25° C., and then diluted with ethyl acetate (10.0 mL) and extracted with ethyl acetate (3×15.0 mL). The combined organic layers were dried over Na₂SO₄, filtered and concentrated under reduced pressure to give a residue. The residue was purified by prep-HPLC (column: Phenomenex C18 75*30 mm*3 um; mobile phase: [water(NH₄HCO₃)—CH₃CN]; B %: 45%-75%, 8 min) to give tert-butyl 4-[2-(2,8-dimethylimidazo[1,2-b]pyridazin-6-yl)-7-fluoro-indazol-5-yl]piperidine-1-carboxylate (15.0 mg, 10%) as a solid. LCMS: (ESI, m/z): 465.3 [M+H]^{+ 1}H NMR (CDCl₃, 400 MHz) δ ppm 8.94 (d, 1H, J=2.7 Hz) 8.02 (d, 1H, J=0.9 Hz) 7.74 (s, 1H) 7.30 (br s, 1H) 6.90 (d, 1H, J=12.3 Hz) 4.1-4.5 (m, 2H) 2.7-2.9 (m, 6H) 2.5-2.6 (m, 3H) 1.8-2.0 (m, 2H) 1.6-1.7 (m, 2H) 1.51 (s, 9H) ¹⁹F NMR (CDCl₃, 376 MHz) δ ppm −128.21 (s, 1F).

### Synthesis of Compound 120

[chemical structure]

[0293] To a solution of tert-butyl 4-[2-(2,8-dimethylimidazo[1,2-b]pyridazin-6-yl)-7-fluoro-indazol-5-yl]piperidine-1-carboxylate (15.0 mg, 32.2 umol, 1 eq) in EtOAc (500 uL) was added HCl/EtOAc (4 M, 1.00 mL) under N₂ atmosphere. The mixture was stirred at 25° C. for 12 hrs. TLC (petroleum ether/ethyl acetate=1/1, Rf=0.01) showed the starting material was consumed and a new major spot was generated. The reaction mixture was concentrated under reduced pressure. The crude product was purified by re-crystallization from MeOH (10.0 mL) at 25° C. to give 6-[7-fluoro-5-(4-piperidyl)indazol-2-yl]-2,8-dimethyl-imidazo[1,2-b]pyridazine (12.4 mg, 92.4%) as a solid. LCMS: (ESI, m/z): 365.1 [M+H]^{+ 1}H NMR (MeOD-d₄, 400 MHz) δ ppm 9.27 (d, 1H, J=2.6 Hz), 8.67 (d, 1H, J=1.1 Hz), 8.36 (d, 1H, J=0.7 Hz), 7.51 (s, 1H), 7.1-7.2 (m, 1H), 3.55 (br d, 2H, J=12.8 Hz), 3.1-3.2 (m, 2H), 3.0-3.1 (m, 1H), 2.85 (d, 3H, J=0.9 Hz), 2.68 (d, 3H, J=0.6 Hz), 2.18 (br d, 2H, J=14.2 Hz), 1.9-2.0 (m, 2H) ¹⁹F NMR (MeOD-d₄, 376 MHz) δ ppm −129.69 (s, 1F)

### Example 29: Synthesis of Compound 121

### Synthesis of Intermediate C49

[chemical structure]

[0294] A mixture of tert-butyl piperazine-1-carboxylate (1.13 g, 6.09 mmol, 1.2 eq), LiHMDS (1 M, 20.1 mL, 4 eq), 5-bromo-2H-indazole (1.00 g, 5.08 mmol, 1 eq) [2-(2-aminophenyl)phenyl]-methylsulfonyloxy-palladium;dicyclohexyl-[2-(2,6-diisopropoxyphenyl)phenyl]phosphane (424 mg, 507 umol, 0.1 eq), dicyclohexyl-[2-(2,6-diisopropoxyphenyl)phenyl]phosphane (236 mg, 507 umol, 0.1 eq) in THE (10.0 mL) was degassed and purged with N₂ for 3 times, and then the mixture was stirred at 80° C. for 12 hrs under N₂ atmosphere. The reaction mixture was quenched by addition water (10.0 mL) at 25° C., and then extracted with ethyl acetate (3×20.0 mL). The combined organic layers were dried over Na₂SO₄, filtered and concentrated under reduced pressure to give a residue. The residue was purified by column chromatography (SiO₂, petroleum ether/ethyl acetate=10/1 to 3/1) to afford tert-butyl 4-(2H-indazol-5-yl) piperazine-1-carboxylate (500 mg, 29%) as a solid. LCMS: (ESI, m/z): 303.1 [M+H]^{+ 1}H NMR (DMSO-d₆, 400 MHz) δ ppm 12.85 (br s, 1H) 7.90 (s, 1H) 7.42 (br d, 1H, J=9.0 Hz) 7.2-7.2 (m, 1H) 7.12 (s, 1H) 3.48 (br s, 4H) 3.01 (br d, 4H, J=4.3 Hz) 1.42 (s, 9H)

### Synthesis of Intermediate C50

[chemical structure]

[0295] A mixture of tert-butyl 4-(2H-indazol-5-yl)piperazine-1-carboxylate (150 mg, 496 umol, 1.5 eq), 5-bromo-2,7-dimethyl-indazole (74.4 mg, 330 umol, 1 eq), N,N [symbol] bis(2-furylmethyl)oxamide (8.21 mg, 33.0 umol, 0.1 eq), K₃PO₄ (140.4 mg, 661 umol, 2 eq) and Cu₂O (4.73 mg, 33.0 umol, 3.38 uL, 0.1 eq) in DMSO (2.00 mL) was degassed and purged with N₂ for 3 times, and then the mixture was stirred at 120° C. for 8 hrs under N₂ atmosphere. LC-MS showed the starting material was consumed and 36% of desired compound was detected. The reaction mixture was quenched by addition water (10.0 mL) at 25° C., and then diluted with ethyl acetate (10.0 mL) and extracted with ethyl acetate (3×5.00 mL). The combined organic layers were washed with brine (5.00 mL), dried over Na₂SO₄, filtered and concentrated under reduced pressure to give a residue. The residue was purified by prep-HPLC (column: Phenomenex C18 75*30 mm*3 um; mobile phase: [water(NH₄HCO₃)-ACN]; B %: 45%-65%, 8 min) to give tert-butyl 4-[2-(2,7-dimethylindazol-5-yl)indazol-5-yl]piperazine-1-carboxylate (12.0 mg, 7.31%) as a solid. LCMS: (ESI, m/z): 447.2 [M+H]^{+ 1}H NMR (CDCl₃, 400 MHz) δ ppm 8.28 (s, 1H), 7.99 (s, 1H), 7.90 (d, 1H, J=1.5 Hz), 7.72 (d, 1H, J=9.3 Hz), 7.63 (d, 1H, J=0.6 Hz), 7.18 (dd, 1H, J=2.1, 9.5 Hz), 6.97 (d, 1H, J=1.7 Hz), 4.28 (s, 3H), 3.6-3.7 (m, 4H), 3.1-3.1 (m, 4H), 2.73 (s, 3H), 1.51 (s, 9H)

### Synthesis of Compound 121

[chemical structure]

[0296] To a solution of tert-butyl 4-[2-(2,7-dimethylindazol-5-yl)indazol-5-yl]piperazine-1-carboxylate (12.0 mg, 26.8 umol, 1 eq) in ethyl acetate (500 uL) was added HCl/ethyl acetate (4 M, 958 uL) under N₂ atmosphere. The mixture was stirred at 25° C. for 12 hrs. TLC (petroleum ether/ethyl acetate=1/1, Rf=0.01) showed the starting material was consumed and a new major spot was generated. The reaction mixture was concentrated under reduced pressure. The crude product was purified by re-crystallization from MeOH (10.0 mL) at 25° C. to give 2,7-dimethyl-5-(5-piperazin-1-ylindazol-2-yl)indazole (8.95 mg, 93.2%) as a solid. LCMS: (ESI, m/z): 347.1 [M+H]^{+ 1}H NMR (DMSO-d₆, 400 MHz) δ ppm 9.21 (br s, 2H), 8.84 (s, 1H), 8.45 (s, 1H), 8.11 (d, 1H, J=1.4 Hz), 7.77 (s, 1H), 7.64 (d, 1H, J=9.3 Hz), 7.24 (dd, 1H, J=2.1, 9.5 Hz), 7.04 (d, 1H, J=1.5 Hz), 4.21 (s, 3H), 3.35 (br d, 4H, J=5.2 Hz), 3.27 (br s, 4H), 2.60 (s, 3H)

### Example 30: Synthesis of Compound 123

### Synthesis of Intermediate C53

[chemical structure]

[0297] To a mixture of tert-butyl 4-[7-fluoro-5-(4,4,5,5-tetramethyl-1,3,2-dioxaborolan-2-yl)indazol-2-yl]piperidine-1-carboxylate (200 mg, 449 umol, 1.50 eq) and 6-bromo-5-methoxy-2,4-dimethyl-1,3-benzoxazole (76.7 mg, 299 umol, 1.0 eq) in dioxane (1.60 mL) was added a solution of K₂CO₃ (82.7 mg, 599 umol, 2.0 eq) in H₂O (0.400 mL). Then, 1,1-bis(diphenylphosphino)ferrocene]dichloropalladium(II) (43.8 mg, 59.9 umol, 0.20 eq) was added to the above mixture under N₂ protection. The reaction mixture was stirred at 80° C. for 1 hr. The reaction mixture was diluted with H₂O (10.0 mL), extracted with ethyl acetate (3×10.0 mL), dried over Na₂SO₄, filtered and concentrated under reduced pressure to give an oil. The oil was purified by column chromatography on silica gel eluted with petroleum ether/ethyl acetate (1/0 to 5/1) to give tert-butyl 4-[7-fluoro-5-(5-methoxy-2,4-dimethyl-1,3-benzoxazol-6-yl)indazol-2-yl]piperidine-1-carboxylate (130 mg, 82.5%) as an oil. LCMS: (ESI, m/z): 495.3 [M+H]^{+ 1}H NMR (400 MHz, METHANOL-d₄) δ ppm 8.45 (d, J=2.62 Hz, 1H) 7.68 (d, J=1.07 Hz, 1H) 7.41 (s, 1H) 7.27 (dd, J=12.87, 1.19 Hz, 1H) 4.74 (s, 1H) 4.30 (br d, J=13.95 Hz, 2H) 3.39 (s, 3H) 3.05 (br s, 2H) 2.65 (s, 3H) 2.53 (s, 3H) 2.07-2.29 (m, 4H) 1.51 (s, 9H).

### Synthesis of Compound 123

[chemical structure]

[0298] To a solution of tert-butyl 4-[7-fluoro-5-(5-methoxy-2,4-dimethyl-1,3-benzoxazol-6-yl)indazol-2-yl]piperidine-1-carboxylate (60.0 mg, 121 umol, 1.00 eq) in dichloromethane (6.00 mL) was added BBr₃ (152 mg, 607 umol, 5.00 eq) at 0° C. The reaction mixture was stirred at 25° C. for 12 hrs. The reaction mixture was filtered, the filter cake was purified by prep-HPLC (column: waters Xbridge Prep OBD C18 150*40 mm*10 um; mobile phase: [water (NH₄HCO₃)-acetonitrile]; B %: 35%-55%, 8 min) to give 6-[7-fluoro-2-(4-piperidyl)indazol-5-yl]-2,4-dimethyl-1,3-benzoxazol-5-ol (EVAL-0122-0016, 25.3 mg, 55%) as a solid. LCMS: (ESI, m/z): 381.2 [M+H]^{+ 1}HNMR (400 MHz, METHANOL-d₄) δ ppm 8.41 (d, J=2.75 Hz, 1H) 7.61 (d, J=1.00 Hz, 1H) 7.30 (s, 1H) 7.21 (dd, J=12.76, 1.13 Hz, 1H) 4.62-4.73 (m, 1H) 3.27 (br s, 2H) 2.88 (td, J=12.54, 2.31 Hz, 2H) 2.62 (s, 3H) 2.48 (s, 3H) 2.26 (br s, 2H) 2.10-2.22 (m, 2H).

### Example 31: Synthesis of Compound 125

### Synthesis of Intermediate C56

[chemical structure]

[0299] A solution of 5-bromo-7-fluoro-2H-indazole (5.00 g, 23.2 mmol, 1.0 eq) in N,N-dimethylformamide (50.0 mL) was added tert-butyl 4-bromopiperidine-1-carboxylate (18.4 g, 69.7 mmol, 3.0 eq), KI (11.5 g, 69.7 mmol, 3.0 eq) and Cs₂CO₃ (37.8 g, 116 mmol, 5.0 eq). The reaction mixture was stirred at 100° C. for 12 hrs. The reaction mixture was diluted with H₂O (100 mL), extracted with ethyl acetate (3×100 mL), washed with brine (2×100 mL), dried over Na₂SO₄ filtered and concentrated under reduced pressure to give an oil. The oil was purified by column chromatography on silica gel eluted with petroleum ether/ethyl acetate (50/1 to 5/1) to give yellow oil. The yellow oil was purified by prep-HPLC (column: Xtimate C18 10u 250 mm*80 mm; mobile phase: [water (NH₄HCO₃)-acetonitrile]; B %: 60%-95%, 25 min) to afford tert-butyl 4-(5-bromo-7-fluoro-indazol-2-yl) piperidine-1-carboxylate (3.00 g, 29%) as a solid. LCMS: (ESI, m/z): 342.0 [M+H]⁺. ¹H NMR (400 MHz, DMSO-d₆) δ ppm 8.58 (d, J=2.86 Hz, 1H) 7.81 (d, J=1.55 Hz, 1H) 7.26 (dd, J=11.03, 1.49 Hz, 1H) 4.69-4.84 (m, 1H) 4.09 (br d, J=11.68 Hz, 2H) 2.95 (br s, 2H) 2.12 (br dd, J=12.10, 2.09 Hz, 2H) 1.88-1.97 (m, 2H) 1.43 (s, 9H)

### Synthesis of Intermediate C57

[chemical structure]

[0300] A mixture of tert-butyl 4-(5-bromo-7-fluoro-indazol-2-yl)piperidine-1-carboxylate (2.50 g, 6.28 mmol, 1.0 eq) and bis(pinacolato)diboron (4.78 g, 18.8 mmol, 3.0 eq) in dioxane (25.0 mL) was added potassium acetate (1.23 g, 12.5 mmol, 2.0 eq). The mixture was bubbled with argon for 5 min. Then chloro(2-dicyclohexylphosphino-2′,4′,6′-triisopropyl-1,1′-biphenyl)[2-(2′-amino-1,1′-biphenyl)]palladium(II) (493 mg, 627 umol, 0.10 eq) was added in one portion and the mixture was bubbled with argon for additional 5 min. The resulting mixture was stirred 100° C. for 1 hr. LCMS showed the reaction was completed. The reaction mixture was filtered and the filtrate was concentrated in vacuum to afford an oil. The oil was purified by column chromatography on silica gel eluted with petroleum ether/ethyl acetate (1/0 to 5/1) to give tert-butyl 4-[7-fluoro-5-(4,4,5,5-tetramethyl-1,3,2-dioxaborolan-2-yl)indazol-2-yl]piperidine-1-carboxylate (3.00 g, 91.2%) as an oil. LCMS: (ESI, m/z): 446.2 [M+H]^{+ 1}H NMR (400 MHz, DMSO-d6) δ ppm 8.66 (d, J=2.81 Hz, 1H) 7.95 (s, 1H) 7.07 (d, J=12.23 Hz, 1H) 4.76 (s, 1H) 4.10 (br d, J=12.10 Hz, 2H) 2.97 (br s, 2H) 2.10-2.20 (m, 2H) 1.89-1.98 (m, 2H) 1.43 (s, 9H) 1.30 (s, 12H)

### Synthesis of Intermediate C59

[chemical structure]

[0301] To a mixture of tert-butyl 4-[7-fluoro-5-(4,4,5,5-tetramethyl-1,3,2-dioxaborolan-2-yl)indazol-2-yl]piperidine-1-carboxylate (0.20 g, 449 umol, 1.50 eq) and 6-bromo-2,8-dimethyl-imidazo[1,2-a]pyridine (67.4 mg, 299 umol, 1.0 eq) in dioxane (1.60 mL) was added a solution of K₂CO₃ (82.8 mg, 599 umol, 2.0 eq) in H₂O (0.400 mL). Then, 1,1-bis(diphenylphosphino)ferrocene]dichloropalladium(II) (43.8 mg, 59.9 umol, 0.20 eq) was added to the above mixture under N₂ protection. The reaction mixture was stirred at 80° C. for 1 hr. The reaction mixture was diluted with H₂O (10.0 mL), extracted with ethyl acetate (3×10.0 mL), dried over Na₂SO₄ filtered and concentrated under reduced pressure to give an oil that was purified by column chromatography on silica gel eluted with petroleum ether/ethyl acetate (1/0 to 5/1) to give tert-butyl4-[5-(2,8-dimethylimidazo[1,2-a]pyridin-6-yl)-7-fluoro-indazol-2-yl]piperidine-1-carboxylate (0.15 g, 73.4%) as an oil. LCMS: (ESI, m/z): 464.2 [M+H]⁺. ¹H NMR (400 MHz, DMSO-d₆) δ ppm 8.72 (s, 1H) 8.64 (d, J=2.41 Hz, 1H) 7.84 (s, 1H) 7.65 (s, 1H) 7.38-7.47 (m, 2H) 4.77 (brt, J=11.29 Hz, 1H) 4.07-4.18 (m, 2H) 3.33 (s, 3H) 2.90-3.07 (m, 2H) 2.35 (s, 3H) 2.11-2.17 (m, 2H) 1.95-2.04 (m, 2H) 1.44 (s, 9H)

### Synthesis of Compound 125

[chemical structure]

[0302] To a solution of tert-butyl 4-[5-(2,8-dimethylimidazo[1,2-a]pyridin-6-yl)-7-fluoro-indazol-2-yl]piperidine-1-carboxylate (65.0 mg, 140 umol, 1.0 eq) in dioxane (2.00 mL) was added HCl/dioxane (4.0 M, 1.30 mL, 37.1 eq) dropwise under N₂ protection. The reaction mixture was stirred at 25° C. for 1 hr. LCMS showed the reaction was completed. The reaction mixture was filtered and the filter cake was dried in vacuum to afford a solid. The solid was purified by prep-HPLC (column: Phenomenex Luna 80*30 mm*3 um; mobile phase: [water (HCl)-acetonitrile]; B %: 1%-35%, 8 min) to get 5-(2,8-dimethylimidazo[1,2-a]pyridin-6-yl)-7-fluoro-2-(4-piperidyl)indazole (35.4 mg, 62.6%) as a solid. LCMS: (ESI, m/z): 364.1 [M+H]⁺. ¹H NMR (400 MHz, METHANOL-d₄) δ ppm 8.90 (s, 1H) 8.59 (d, J=2.63 Hz, 1H) 8.11 (s, 1H) 7.97 (dd, J=12.38, 1.13 Hz, 2H) 7.43 (dd, J=12.51, 1.38 Hz, 1H) 5.00 (dt, J=10.04, 5.05 Hz, 1H) 3.61-3.73 (m, 2H) 3.32 (br s, 2H) 2.71 (s, 3H) 2.60 (d, J=0.88 Hz, 3H) 2.43-2.55 (m, 4H). ¹⁹F NMR (377 MHz, METHANOL-d4) δ ppm −129.79 (s, 1F)

### Example 32: Synthesis of Compound 126

### Synthesis of Intermediate C62

[chemical structure]

[0303] To a mixture of tert-butyl 4-[7-fluoro-5-(4,4,5,5-tetramethyl-1,3,2-dioxaborolan-2-yl)indazol-2-yl]piperidine-1-carboxylate (BC, 300 mg, 674 umol, 1.50 eq) and 5-bromo-2,7-dimethyl-indazol-6-ol (108 mg, 449 umol, 1.00 eq) in dioxane (2.40 mL) was added a solution of K₂CO₃ (124 mg, 898 umol, 2.00 eq) in H₂O (0.600 mL) and 1,1-bis(diphenylphosphino) ferrocene] dichloropalladium(II) (65.7 mg, 89.8 umol, 0.200 eq) successively under N₂ protection. The reaction mixture was stirred at 80° C. for 1 hr. The reaction mixture was diluted with H₂O (10.0 mL), extracted with ethyl acetate (3×10.0 mL), dried over Na₂SO₄, filtered and concentrated under reduced pressure to give brown solid. The oil was triturated with dichloromethane (5.00 mL) and filtered. The filter cake was dried over in vacuum to give tert-butyl 4-[7-fluoro-5-(6-hydroxy-2,7-dimethyl-indazol-5-yl)indazol-2-yl]piperidine-1-carboxylate (65.0 mg, 27.7%) as a solid. LCMS: (ESI, m/z): 480.1 [M+H]⁺. ¹H NMR (400 MHz, DMSO-d₆) δ ppm 8.58 (d, J=2.74 Hz, 1H) 8.20 (d, J=15.74 Hz, 2H) 7.54 (s, 1H) 7.40 (s, 1H) 7.11-7.19 (m, 1H) 4.76 (br t, J=3.81 Hz, 1H) 4.11 (s, 5H) 2.98 (br d, J=1.31 Hz, 2H) 2.39 (s, 3H) 2.14 (br d, J=10.01 Hz, 2H) 1.98 (qd, J=12.16, 4.29 Hz, 2H) 1.44 (s, 9H).

### Synthesis of Compound 126

[chemical structure]

[0304] To a solution of tert-butyl 4-[7-fluoro-5-(6-hydroxy-2,7-dimethyl-indazol-5-yl)indazol-2-yl]piperidine-1-carboxylate (50.0 mg, 104 umol, 1.00 eq) in ethyl acetate (1.00 mL) was added HCl/ethyl acetate (4.00 M, 1.00 mL, 38.5 eq). The reaction mixture was stirred at 25° C. for 1 hr. The reaction mixture was filtered and the filter cake was concentrated in vacuum to afford a solid. The solid was purified by prep-HPLC (column: Phenomenex Luna 80*30 mm*3 um; mobile phase: [water (HCl)-acetonitrile]; B %: 5%-30%, 8 min) to give 5-[7-fluoro-2-(4-piperidyl)indazol-5-yl]-2,7-dimethyl-indazol-6-ol (30.9 mg, 60.1%) as a solid. LCMS: (ESI, m/z): 380.1 [M+H]⁺. ¹HNMR (400 MHz, METHANOL-d₄) δ ppm 8.73 (s, 1H) 8.49 (d, J=2.62 Hz, 1H) 7.74 (s, 1H) 7.65 (d, J=1.07 Hz, 1H) 7.18 (dd, J=12.64, 1.19 Hz, 1H) 4.96 (dt, J=9.95, 4.92 Hz, 1H) 4.36 (s, 3H) 3.66 (br d, J=13.35 Hz, 2H) 3.32-3.36 (m, 2H) 2.41-2.57 (m, 7H).

### Example 33: Synthesis of Compound 133

### Synthesis of Intermediate C64

[chemical structure]

[0305] To a solution of 6-bromo-2,8-dimethyl-imidazo[1,2-a]pyrazine (60.9 mg, 269 umol, 1.00 eq) and tert-butyl 4-[7-fluoro-5-(4,4,5,5-tetramethyl-1,3,2-dioxaborolan-2-yl)indazol-2-yl]piperidine-1-carboxylate (BC, 180 mg, 404 umol, 1.50 eq) in dioxane (1.50 mL) was added a solution of K₂CO₃ (74.4 mg, 538 umol, 2.00 eq) in H₂O (0.400 mL) and 1,1-bis (diphenylphosphino)ferrocene]dichloropalladium(II) (39.4 mg, 53.9 umol, 0.200 eq) successively under N₂ protection. The reaction mixture was stirred at 80° C. for 1 hr. The reaction mixture was diluted with H₂O (10.0 mL), extracted with ethyl acetate (3×10.0 mL), dried over Na₂SO₄ filtered and concentrated under reduced pressure to give an oil. The oil was purified by column chromatography on silica gel eluted with petroleum ether/ethyl acetate (1/0 to 5/1) to give tert-butyl 4-[5-(2,8-dimethylimidazo[1,2-a]pyrazin-6-yl)-7-fluoro-indazol-2-yl]piperidine-1-carboxylate (80.0 mg, 55%) as an oil. LCMS: (ESI, m/z): 464.3 [M+H]⁺. 1H NMR (400 MHz, METHANOL-d₄) δ ppm 8.41 (d, J=2.69 Hz, 1H) 8.19 (s, 1H) 7.73 (dd, J=3.12, 1.04 Hz, 2H) 7.27-7.45 (m, 2H) 4.71 (tt, J=11.48, 4.17 Hz, 1H) 4.20-4.33 (m, 5H) 3.03 (br s, 2H) 2.63 (s, 3H) 2.07-2.28 (m, 4H) 1.50 (s, 9H).

### Synthesis of Compound 133

[chemical structure]

[0306] To a solution of tert-butyl 4-[5-(2,7-dimethylindazol-5-yl)-7-fluoro-indazol-2-yl]piperidine-1-carboxylate (80.0 mg, 173 umol, 1.00 eq) in dioxane (1.60 mL) was added HCl/dioxane (4.00 M, 1.64 mL, 38.0 eq). The reaction mixture was stirred at 25° C. for 1 hr. The reaction mixture was filtered and filter cake was dried in vacuum to get 5-(2,7-dimethylindazol-5-yl)-7-fluoro-2-(4-piperidyl)indazole (36.7 mg, 58%) as a solid. LCMS: (ESI, m/z): 364.1 [M+H]⁺. ¹H NMR (400 MHz, Deuterium oxide) δ ppm 8.15 (d, J=2.62 Hz, 1H) 7.92 (s, 1H) 7.30 (d, J=19.67 Hz, 2H) 7.09 (s, 1H) 6.93 (d, J=13.35 Hz, 1H) 4.70 (s, 1H) 4.03 (s, 3H) 3.61 (br d, J=13.47 Hz, 2H) 3.20 (td, J=12.64, 3.58 Hz, 2H) 2.21-2.41 (m, 7H).

### Example 34: Synthesis of Compound 132

### Synthesis of Intermediate C67

[chemical structure]

[0307] To a mixture of tert-butyl 4-[7-fluoro-5-(4,4,5,5-tetramethyl-1,3,2-dioxaborolan-2-yl)indazol-2-yl]piperidine-1-carboxylate (200 mg, 449 umol, 1.50 eq) and 6-bromo-2,8-dimethyl-imidazo[1,2-a]pyrazine (67.7 mg, 299 umol, 1.0 eq) in dioxane (1.60 mL) was added a solution of K₂CO₃ (82.8 mg, 599 umol, 2.0 eq) in H₂O (0.400 mL). Then, 1,1-bis(diphenylphosphino)ferrocene]dichloropalladium(II) (43.8 mg, 59.9 umol, 0.20 eq) was added to the above mixture under N₂ protection. The reaction mixture was stirred at 80° C. for 1 hr. The reaction mixture was diluted with H₂O (10.0 mL), extracted with ethyl acetate (3×10.0 mL), dried over Na₂SO₄ filtered and concentrated under reduced pressure to give an oil. The oil was purified by column chromatography on silica gel eluted with petroleum ether/ethyl acetate (1/0 to 5/1) to give tert-butyl 4-[5-(2,8-dimethylimidazo[1,2-a]pyrazin-6-yl)-7-fluoro-indazol-2-yl]piperidine-1-carboxylate (85.0 mg, 55%) as a solid. LCMS: (ES, m/z): 465.2 [M+H]⁺. ¹H NMR (400 MHz, METHANOL-d₄) δ ppm 8.71 (s, 1H) 8.48 (d, J=2.63 Hz, 1H) 8.16 (d, J=0.88 Hz, 1H) 7.76 (s, 1H) 7.61 (dd, J=13.13, 1.00 Hz, 1H) 4.67-4.79 (m, 1H) 4.29 (br d, J=13.38 Hz, 2H) 3.04 (br s, 2H) 2.85 (s, 3H) 2.49 (s, 3H) 2.07-2.28 (m, 4H) 1.50 (s, 9H).

### Synthesis of Compound 132

[chemical structure]

[0308] To a solution of tert-butyl 4-[5-(2,8-dimethylimidazo[1,2-a]pyrazin-6-yl)-7-fluoro-indazol-2-yl]piperidine-1-carboxylate (80.0 mg, 172 umol, 1.0 eq) in ethyl acetate (1.60 mL) was added HCl/ethyl acetate (4.0 M, 1.61 mL, 37.5 eq). The reaction mixture was stirred at 25° C. for 1 hr. The reaction mixture was filtered. The filter cake was dried in vacuum to get 6-[7-fluoro-2-(4-piperidyl)indazol-5-yl]-2,8-dimethyl-imidazo[1,2-a]pyrazine (49.6 mg, 79%) as a solid. LCMS: (ESI, m/z): 365.1 [M+H]⁺. ¹H NMR (400 MHz, D₂O) δ ppm 8.77 (s, 1H) 8.57 (d, J=2.38 Hz, 1H) 7.85-8.16 (m, 2H) 7.52 (d, J=12.63 Hz, 1H) 4.91-5.03 (m, 1H) 3.67 (br d, J=13.38 Hz, 2H) 3.30 (td, J=12.91, 2.69 Hz, 2H) 2.87 (s, 3H) 2.54 (s, 7H).

### Example 35: Synthesis of Compound 134

### Synthesis of C69

[chemical structure]

[0309] To a mixture of tert-butyl 4-[7-fluoro-5-(4,4,5,5-tetramethyl-1,3,2-dioxaborolan-2-yl)indazol-2-yl]piperidine-1-carboxylate (200 mg, 449 umol, 1.50 eq) and 6-bromo-2-methyl-1,3-benzothiazole (68.3 mg, 299 umol, 1 eq) in dioxane (1.60 mL) was added a solution of K₂CO₃ (82.8 mg, 599 umol, 2.00 eq) in H₂O (0.400 mL). Then, [1, 1-bis(diphenylphosphino) ferrocene] dichloropalladium(II) (43.8 mg, 59.9 umol, 0.200 eq) was added to the mixture under N₂ protection. The reaction mixture was stirred at 80° C. for 1 hr. The reaction mixture was diluted with water (10.0 mL), extracted with ethyl acetate (3×20.0 mL). The organic phase was washed with brine (30.0 mL), dried over Na₂SO₄, filtered and the filtrate was concentrated under reduced pressure to give an oil. The oil was purified by chromatography on a silica gel eluted with petroleum ether/ethyl acetate (1/0 to 5/1) to give tert-butyl 4-[7-fluoro-5-(2-methyl-1,3-benzothiazol-6-yl)indazol-2-yl]piperidine-1-carboxylate (120 mg, 70.2%) as an oil. LCMS: (ESI, m/z): 467.2 [M+H]⁺. ¹H NMR (400 MHz, METHANOL-d4) δ ppm 8.47 (d, J=2.75 Hz, 1H) 8.21 (d, J=1.63 Hz, 1H) 7.95 (d, J=8.50 Hz, 1H) 7.69-7.86 (m, 2H) 7.39 (dd, J=12.88, 1.25 Hz, 1H) 4.74 (s, 1H) 4.29 (br d, J=13.76 Hz, 2H) 2.97-3.12 (m, 2H) 2.85 (s, 3H) 2.06-2.31 (m, 4H) 1.50 (s, 9H)

### Synthesis of Compound 134

[chemical structure]

[0310] To a mixture of tert-butyl 4-[7-fluoro-5-(2-methyl-1, 3-benzothiazol-6-yl) indazol-2-yl] piperidine-1-carboxylate (60.0 mg, 129 umol, 1.00 eq) in dioxane (1.20 mL) was added HCl/dioxane (4.0 M, 1.20 mL, 37.3 eq). The reaction mixture was stirred at 25° C. for 2 hrs. The reaction mixture was filtered and the filter cake was dried in vacuum to give 6-(7-fluoro-2-(piperidin-4-yl)-2H-indazol-5-yl)-2-methylbenzo[d]thiazole (30.2 mg, 57%) as a solid. LCMS: (ESI, m/z): 367.0 [M+H]⁺. ¹H NMR (400 MHz, METHANOL-d4) δ ppm 8.54 (d, J=2.69 Hz, 1H) 8.40 (d, J=1.22 Hz, 1H) 7.97-8.08 (m, 2H) 7.90 (d, J=1.22 Hz, 1H) 7.44 (dd, J=12.78, 1.28 Hz, 1H) 4.97 (tt, J=9.90, 5.14 Hz, 1H) 3.61-3.70 (m, 2H) 3.34 (br s, 1H) 3.28 (br d, J=5.14 Hz, 1H) 3.05 (s, 3H) 2.43-2.58 (m, 4H)

### Example 36: Synthesis of Compound 135

### Synthesis of Intermediate C70

[chemical structure]

[0311] To a mixture of tert-butyl 4-[7-fluoro-5-(4,4,5,5-tetramethyl-1,3,2-dioxaborolan-2-yl)indazol-2-yl]piperidine-1-carboxylate (135 mg, 303 umol, 1.50 eq) and 6-bromo-4-fluoro-2-methyl-1,3-benzoxazole (46.4 mg, 202 umol, 1.00 eq) in dioxane (1.08 mL) was added a solution of K₂CO₃ (55.8 mg, 404 umol, 2.00 eq) in H₂O (0.270 mL) and 1,1 [symbol] bis(diphenylphosphino)ferrocenedichloro palladium(II) (29.5 mg, 40.4 umol, 0.20 eq) successively. The reaction mixture was stirred at 80° C. for 1 hr. The reaction mixture was diluted with water (10.0 mL), extracted with ethyl acetate (3×10.0 mL), dried over Na₂SO₄, filtered and concentrated under reduced pressure to give oil. The oil was purified by column chromatography on silica gel eluted with petroleum ether/ethyl acetate (5/1 to 1/1) to give tert-butyl 4-[7-fluoro-5-(2-methyl-1,3-benzoxazol-6-yl)indazol-2-yl]piperidine-1-carboxylate (40.0 mg, 27%) as an oil. LCMS: (ESI, m/z): 451.2 [M+H]⁺. ¹H NMR (400 MHz, METHANOL-d₄) δ ppm 8.46 (d, J=2.69 Hz, 1H) 7.78-7.89 (m, 2H) 7.62-7.73 (m, 2H) 7.36 (dd, J=12.84, 1.34 Hz, 1H) 4.66-4.80 (m, 1H) 4.29 (br d, J=13.82 Hz, 2H) 3.04 (br dd, J=4.52, 2.57 Hz, 2H) 2.67 (s, 3H) 2.07-2.27 (m, 4H) 1.50 (s, 9H).

### Synthesis of Compound 135

[chemical structure]

[0312] To a solution of tert-butyl 4-[7-fluoro-5-(2-methyl-1,3-benzoxazol-6-yl) indazol-2-yl]piperidine-1-carboxylate (40.0 mg, 88.7 umol, 1.00 eq) in ethyl acetate (0.800 mL) was added HCl/ethyl acetate (1.78 mmol, 0.800 mL, 20.0 eq). The reaction mixture was stirred at 25° C. for 1 hr. The reaction mixture was filtered and the filter cake was purified by prep-HPLC (column: Phenomenex C18 75*30 mm*3 um; mobile phase: [water (NH₄HCO₃)-acetonitrile]; B %: 20%-55%, 8 mins) to give 6-[7-fluoro-2-(4-piperidyl)indazol-5-yl]-2-methyl-1,3-benzoxazole (10.7 mg, 34.4%) as a solid. LCMS: (ESI, m/z): 351.2 [M+H]⁺. ¹H NMR (400 MHz, METHANOL-d₄) 6=8.45 (d, J=2.7 Hz, 1H), 7.86-7.78 (m, 2H), 7.67 (s, 2H), 7.37 (d, J=13.0 Hz, 1H), 4.72-4.63 (m, 1H), 3.27 (br d, J=13.1 Hz, 2H), 2.86 (dt, J=2.4, 12.6 Hz, 2H), 2.67 (s, 3H), 2.30-2.09 (m, 4H).

### Example 37: Synthesis of Compound 136

### Synthesis of Intermediate C72

[chemical structure]

[0313] To a mixture of tert-butyl 4-[7-fluoro-5-(4,4,5,5-tetramethyl-1,3,2-dioxaborolan-2-yl)indazol-2-yl]piperidine-1-carboxylate (135 mg, 303 umol, 1.50 eq) and 6-bromo-4-fluoro-2-methyl-1,3-benzoxazole (46.5 mg, 202 umol, 1.00 eq) in dioxane (1.08 mL) was added a solution of K₂CO₃ (55.7 mg, 404 umol, 2.00 eq) in H₂O (0.270 mL). Then, 1,1-bis(diphenylphosphino)ferrocene]dichloropalladium(II) (29.6 mg, 40.4 umol, 0.200 eq) was added to the above mixture. The reaction mixture was stirred at 80° C. for 1 hr. The reaction mixture was diluted with H₂O (10 mL), extracted with ethyl acetate (3×10 mL), dried over Na₂SO₄, filtered and concentrated under reduced pressure to give an oil. The oil was purified by column chromatography on silica gel eluted with petroleum ether/ethyl acetate (1/0 to 5/1) to give tert-butyl4-[7-fluoro-5-(4-fluoro-2-methyl-1,3-benzoxazol-6-yl)indazol-2-yl]piperidine-1-carboxylate (50.0 mg, 47.0%) as a solid. LCMS: (ESI, m/z): 469.2 [M+H]⁺. ¹H NMR (400 MHz, METHANOL-d₄) δ ppm 8.48 (d, J=2.74 Hz, 1H) 7.69-7.88 (m, 2H) 7.33-7.51 (m, 2H) 4.69-4.79 (m, 1H) 4.29 (br d, J=13.47 Hz, 2H) 2.95-3.11 (m, 2H) 2.68 (s, 3H) 2.07-2.26 (m, 4H) 1.50 (s, 9H).

### Synthesis of Compound 136

[chemical structure]

[0314] A solution of tert-butyl 4-[7-fluoro-5-(4-fluoro-2-methyl-1,3-benzoxazol-6-yl)indazol-2-yl]piperidine-1-carboxylate (45.0 mg, 96.1 umol, 1.00 eq) in ethyl acetate (0.900 mL) was added HCl/ethyl acetate (4.0 M, 912 μL, 38.0 eq). The reaction mixture was stirred at 25° C. for 1 hr. The reaction mixture was filtered and the filter cake was purified by prep-HPLC (column: Phenomenex C18 75*30 mm*3 um; mobile phase: [water (NH₄HCO₃)-acetonitrile]; B %: 15%-50%, 8 min) to afford 4-fluoro-6-[7-fluoro-2-(4-piperidyl)indazol-5-yl]-2-methyl-1,3-benzoxazole (15.4 mg, 43.5%) as a solid. LCMS: (ES, m/z): 369.2 [M+H]⁺. ¹H NMR (400 MHz, METHANOL-d₄) δ ppm 8.47 (d, J=2.57 Hz, 1H) 7.83 (s, 1H) 7.73 (s, 1H) 7.34-7.50 (m, 2H) 4.62-4.76 (m, 1H) 3.26 (br s, 2H) 2.80-2.91 (m, 2H) 2.68 (s, 3H) 2.08-2.30 (m, 4H).

### Example 38: Synthesis of Compound 145

### Synthesis of Intermediate C73

[chemical structure]

[0315] To a mixture of tert-butyl 4-[7-fluoro-5-(4,4,5,5-tetramethyl-1,3,2-dioxaborolan-2-yl)indazol-2-yl]piperidine-1-carboxylate (150 mg, 337 umol, 1.50 eq) in dioxane (2.80 mL) was added [1,1-bis(diphenylphosphino)ferrocene]dichloropalladium(II) (16.4 mg, 22.5 umol, 0.100 eq), 5-bromo-2-methyl-indazole (47.4 mg, 225 umol, 1.00 eq) and a solution of K₂CO₃ (62.1 mg, 449 umol, 2.00 eq) in H₂O (0.700 mL) under N₂ protection. The reaction mixture was stirred at 80° C. for 1 hr. The reaction mixture was diluted with water (5.00 mL), extracted with ethyl acetate (3×10.0 mL), washed with brine (15.0 mL), dried over Na₂SO₄, filtered and concentrated under reduced pressure to give residue. The residue was purified by column chromatography on a silica gel eluted with ethyl acetate/petroleum ether (0/1 to 1/1) to give tert-butyl 4-[7-fluoro-5-(2-methylindazol-5-yl)indazol-2-yl]piperidine-1-carboxy late (50.0 mg, 48%) as a solid. LCMS: (ES, m/z): 450.2 [M+H]⁺. ¹H NMR (400 MHz, CHLOROFORM-d) δ ppm 8.04 (d, J=2.63 Hz, 1H) 7.96 (s, 1H) 7.83 (d, J=0.63 Hz, 1H) 7.77 (d, J=9.01 Hz, 1H) 7.64 (d, J=1.00 Hz, 1H) 7.58 (dd, J=9.01, 1.75 Hz, 1H) 7.30 (dd, J=12.63, 1.13 Hz, 1H) 4.63 (tt, J=11.62, 4.02 Hz, 1H) 4.29-4.45 (m, 2H) 4.26 (s, 3H) 2.96 (brt, J=11.19 Hz, 2H) 2.25-2.37 (m, 2H) 2.14 (qd, J=12.26, 4.25 Hz, 2H) 1.50 (s, 9H)

### Synthesis of Compound 145

[chemical structure]

[0316] The solution of tert-butyl 4-[7-fluoro-5-(2-methylindazol-5-yl)indazol-2-yl]piperidine-1-carboxylate (50.0 mg, 111 umol, 1.00 eq) in ethyl acetate (1.00 mL) was added HCl/ethyl acetate (1.00 mL). The reaction mixture was stirred at 25° C. for 1 hr. The reaction was filtered and the filter cake was dried in vacuum to give 7-fluoro-5-(2-methylindazol-5-yl)-2-(4-piperidyl)indazole (25.0 mg, 62.4%) as a solid. LCMS: (ESI, m/z): 350.2 [M+H]⁺. ¹H NMR (400 MHz, METHANOL-d4) δ ppm 8.65 (s, 1H) 8.50 (d, J=2.62 Hz, 1H) 8.12 (s, 1H) 7.96 (br d, J=8.94 Hz, 1H) 7.84 (d, J=1.07 Hz, 1H) 7.77 (d, J=9.06 Hz, 1H) 7.41 (dd, J=12.87, 1.19 Hz, 1H) 4.95 (ddt, J=14.74, 9.79, 4.72, 4.72 Hz, 1H) 4.36 (s, 3H) 3.62-3.70 (m, 2H) 3.34 (br d, J=4.89 Hz, 1H) 3.28 (br d, J=4.65 Hz, 1H) 2.43-2.57 (m, 4H)

### Example 39: Synthesis of Compound 146

[chemical structure]

[0317] A mixture of 6-[7-fluoro-2-(4-piperidyl)indazol-5-yl]-2,8-dimethyl-imidazo[1,2-b]pyridazine (50.0 mg, 137 umol, 1.00 eq) in methanol (0.400 mL) was added triethylamine (27.8 mg, 274 umol, 2.00 eq). Then, acetaldehyde (5.0 M, 54.9 uL, 2.00 eq) and acetic acid (0.100 mL) was added to the mixture successively. After stirred for 10 mins, sodium cyanoboranuide (12.9 mg, 206 umol, 1.50 eq) was added under N₂ protection. The reaction mixture was stirred at 25° C. for 12 hrs. The mixture was concentrated under reduced pressure to give a residue. The residue was purified by prep-HPLC (Column: Phenomenex Luna 80*30 mm*3 um; mobile phase: [water (HCl)-acetonitrile]; B %: 1%-30%, 8 min) to give 6-[2-(1-ethyl-4-piperidyl)-7-fluoro-indazol-5-yl]-2,8-dimethyl-imidazo[1,2-b]pyridazine (4.38 mg, 8%) as a solid. LCMS: (ES, m/z): 393.1 [M+H]⁺. ¹H NMR (400 MHz, METHANOL-d4) δ ppm 8.68-8.75 (m, 1H) 8.44 (s, 1H) 8.33 (s, 1H) 8.30 (s, 1H) 7.84 (brd, J=12.76 Hz, 1H) 4.97-5.06 (m, 1H) 3.83 (br d, J=12.51 Hz, 2H) 3.54-3.70 (m, 1H) 3.34-3.41 (m, 1H) 3.26 (br s, 1H) 2.78 (s, 3H) 2.46-2.73 (m, 8H) 1.39-1.48 (m, 3H)

### Example 40: Synthesis of Compound 147

### Synthesis of Intermediate C75

[chemical structure]

[0318] A mixture of 5-chloro-2H-pyrazolo[3,4-c]pyridine (17-1, 1.00 g, 6.51 mmol, 1 eq), tert-butyl 4-bromopiperidine-1-carboxylate (3.44 g, 13.0 mmol, 2 eq), and Cs₂CO₃ (10.6 g, 32.5 mmol, 5 eq) and KI (1.08 g, 6.51 mmol, 1 eq) in DMF (10.0 mL) the mixture was stirred at 100° C. for 12 hrs under N₂ atmosphere. TLC (petroleum ether/ethyl acetate=1/1, Rf=0.27) showed the starting material was consumed and a new major spot was generated. After filtration and the filtrate was concentrated under reduced pressure to afford a residue, which was purified by silica gel column chromatography (petroleum ether/ethyl acetate=1:1) to give tert-butyl 4-(5-chloropyrazolo[3,4-c]pyridin-2-yl)piperidine-1-carboxylate (4.00 g, 16.4%, 90% purity) as a solid. LCMS: (ESI, m/z): 337.1 [M+H]^{+ 1}H NMR (CHLOROFORM-d, 400 MHz) δ ppm 9.05 (1H, s), 7.98 (1H, s), 7.56 (1H, d, J=1.1 Hz), 4.63 (1H, tt, J=11.5 Hz, J=4.1 Hz), 4.34 (2H, br s), 2.92-3.06 (2H, m), 2.26 (2H, br d, J=10.1 Hz), 2.06-2.18 (2H, m), 1.49 (9H, s)

### Synthesis of Intermediate C76

[chemical structure]

[0319] To a solution of tert-butyl 4-(5-chloropyrazolo[3,4-c]pyridin-2-yl)piperidine-1-carboxylate (17-2, 100 mg, 296 umol, 1 eq) and 2,8-dimethyl-6-(4,4,5,5-tetramethyl-1,3,2-dioxaborolan-2-yl)imidazo[1,2-b]pyridazine (97.3 mg, 356 umol, 1.2 eq) in dioxane (10.0 mL) and water (2.50 mL) was added Pd(dppf)Cl₂ (21.7 mg, 29.6 umol, 0.1 eq) and K₂CO₃ (82.0 mg, 593 umol, 2 eq) under N₂ atmosphere. The mixture was stirred at 90° C. for 12 hrs. TLC (ethyl acetate, Rf=0.44) showed the starting material was consumed and a new major spot was generated. The reaction mixture was cooled to 25° C. and quenched by addition water (10.0 mL) at 25° C., and then extracted with ethyl acetate (3×10.0 mL). The combined organic layers were dried over MgSO₄, filtered and concentrated under reduced pressure to give a residue, which was purified by silica gel column chromatography (petroleum ether/ethyl acetate=1:1) to give tert-butyl 4-[5-(2,8-dimethylimidazo[1,2-b]pyridazin-6-yl)pyrazolo[3,4-c]pyridin-2-yl]piperidine-1-carboxylate (40.0 mg, 30.1%) as a solid. LCMS: (ESI, m/z): 448.2 [M+H]^{+ 1}H NMR (CDCl₃, 400 MHz) δ ppm 9.35 (s, 1H) 8.54 (s, 1H) 8.13 (s, 1H) 7.99 (br s, 1H) 7.77 (s, 1H) 4.5-4.8 (m, 1H) 4.2-4.5 (m, 2H) 2.9-3.1 (m, 2H) 2.7-2.8 (m, 3H) 2.5-2.6 (m, 3H) 2.2-2.4 (m, 2H) 2.1-2.2 (m, 2H) 1.51 (s, 9H)

### Synthesis of Compound 147

[chemical structure]

[0320] To a solution of tert-butyl 4-[5-(2,8-dimethylimidazo[1,2-b]pyridazin-6-yl)pyrazolo[3,4-c]pyridin-2-yl]piperidine-1-carboxylate (40.0 mg, 89.3 umol, 1 eq) in EtOAc (1.00 mL) was added HCl/EtOAc (4 M, 2.00 mL) under N₂ atmosphere. The mixture was stirred at 20° C. for 12 hrs. TLC (ethyl acetate, Rf=0.10) showed the starting material was consumed and a new major spot was generated. The reaction mixture was concentrated under reduced pressure to remove ethyl acetate. The crude product was purified by re-crystallization from MeOH (10.0 mL) at 25° C. to give 2,8-dimethyl-6-[2-(4-piperidyl)pyrazolo[3,4-c]pyridin-5-yl]imidazo[1,2-b]pyridazine (24.9 mg, 76.4%) as a solid. LCMS: (ESI, m/z): 348.1 [M+H]^{+ 1}H NMR (MeOD-d₄, 400 MHz) δ ppm 9.67 (s, 1H) 9.12 (s, 1H) 9.04 (s, 1H) 8.64 (s, 1H) 8.41 (s, 1H) 5.2-5.3 (m, 1H) 3.6-3.7 (m, 2H) 3.3-3.4 (m, 2H) 2.85 (s, 3H) 2.69 (s, 3H) 2.5-2.6 (m, 4H)

### Example 41: Synthesis of Compound 148

### Synthesis of Intermediate C77

[chemical structure]

[0321] A mixture of 6-bromo-2H-indazole (100 mg, 507 umol, 1 eq), tert-butyl 4-iodopiperidine-1-carboxylate (315 mg, 1.02 mmol, 2 eq), Cs₂CO₃ (826 mg, 2.54 mmol, 5 eq) in DMF (1.00 mL) was degassed and purged with N₂ for 3 times, and then the mixture was stirred at 100° C. for 12 hrs under N₂ atmosphere. TLC (petroleum ether/ethyl acetate=1/1, Rf=0.27) showed the starting material was consumed and a new major spot was generated. After filtration, the filtrate was concentrated under reduced pressure evaporated to dryness to afford a residue, which was purified by silica gel column chromatography (petroleum ether/ethyl acetate=1:1) to give tert-butyl 4-(6-bromoindazol-2-yl) piperidine-1-carboxylate (100 mg, 51.8%) as a solid. LCMS: (ESI, m/z): 379.9, 381.9 [M+H]^{+ 1}H NMR (CDCl₃, 400 MHz) δ ppm 7.9-8.0 (m, 2H), 7.5-7.6 (m, 1H), 7.1-7.2 (m, 1H), 4.5-4.6 (m, 1H), 4.2-4.4 (m, 2H), 2.8-3.0 (m, 2H), 2.2-2.3 (m, 2H), 2.0-2.2 (m, 2H), 1.4-1.5 (m, 9H)

### Synthesis of Intermediate C78

[chemical structure]

[0322] To a solution of tert-butyl 4-(6-bromoindazol-2-yl)piperidine-1-carboxylate (100 mg, 262 umol, 1 eq) and 7-fluoro-2-methyl-5-(4,4,5,5-tetramethyl-1,3,2-dioxaborolan-2-yl)indazole (72.6 mg, 262 umol, 1 eq) in dioxane (1.00 mL) was added Pd(dppf)Cl₂ (19.2 mg, 26.3 umol, 0.1 eq) and K₂CO₃ (109 mg, 262 umol, 3 eq) under N₂ atmosphere. The mixture was stirred at 90° C. for 12 hrs. TLC (ethyl acetate, Rf=0.45) showed the starting material was consumed and a new major spot was generated. The reaction mixture was cooled to 20° C. The mixture was quenched by adding water (10.0 mL) and the solution was extracted with ethyl acetate (3×20.0 mL). The combined organic layers were dried over MgSO₄, filtered and concentrated under reduced pressure to give a residue, which was purified by silica gel column chromatography (petroleum ether/ethyl acetate=1:1) to give tert-butyl 4-[6-(7-fluoro-2-methyl-indazol-5-yl)indazol-2-yl]piperidine-1-carboxylate (30.0 mg, 25%) as a solid. LCMS: (ESI, m/z): 350.1 [M+H−Boc]^{+ 1}H NMR (CDCl₃, 400 MHz) δ ppm 7.98 (s, 1H), 7.90 (s, 1H), 7.73 (d, 1H, J=8.7 Hz), 7.68 (s, 1H), 7.39 (d, 1H, J=8.7 Hz), 7.31 (d, 1H, J=12.7 Hz), 4.5-4.7 (m, 1H), 4.2-4.4 (m, 5H), 2.9-3.1 (m, 2H), 2.29 (br d, 2H, J=10.5 Hz), 2.1-2.2 (m, 2H), 1.5-1.6 (m, 9H)

### Synthesis of Compound 148

[chemical structure]

[0323] To a solution of tert-butyl 4-[6-(7-fluoro-2-methyl-indazol-5-yl) indazol-2-yl]piperidine-1-carboxylate (30.0 mg, 66.7 umol, 1 eq) in EtOAc (1.00 mL) was added HCl/EtOAc (4 M, 1.00 mL) under N₂ atmosphere. The mixture was stirred at 25° C. for 6 hrs. TLC (ethyl acetate, Rf=0.10) showed the starting material was consumed and a new major spot was generated. The reaction mixture was concentrated under reduced pressure to remove ethyl acetate. The crude product was purified by re-crystallization from MeOH (10.0 mL) at 25° C. to give 7-fluoro-2-methyl-5-[2-(4-piperidyl) indazol-6-yl]indazole (25.0 mg, 92.4%, HCl) as a solid. LCMS: (ESI, m/z): 350.1 [M+H]^{+ 1}H NMR (MeOD-d₄, 400 MHz) δ ppm 8.57 (s, 1H), 8.46 (d, 1H, J=2.2 Hz), 7.8-7.9 (m, 3H), 7.57 (br d, 1H, J=8.6 Hz), 7.47 (br d, 1H, J=12.7 Hz), 5.00 (br s, 1H), 4.29 (s, 3H), 3.67 (br d, 2H, J=12.3 Hz), 3.3-3.4 (m, 2H), 2.4-2.6 (m, 4H) ¹⁹F NMR (MeOD-d₄, 376 MHz) δ ppm −131.06 (s, 1F),

### Example 42: Synthesis of Compound 154

[chemical structure]

[0324] To a solution of tert-butyl 4-[5-(2,8-dimethylimidazo[1,2-b]pyridazin-6-yl)-7-methoxy-indazol-2-yl]piperidine-1-carboxylate (150 mg, 315 umol, 1 eq) in BCl₃ (1M in DCM, 2.00 mL) was stirred at 25° C. for 3 hrs. The reaction mixture was concentrated under reduced pressure to give a residue. The residue was purified by prep-HPLC (column: Phenomenex Luna 80*30 mm*3 um; mobile phase: [water(HCl)-ACN]; B %: 1%-30%, 8 min) to give 5-(2,8-dimethylimidazo[1,2-b]pyridazin-6-yl)-2-(piperidin-4-yl)-2H-indazol-6-ol (23.0 mg, 20.1%, HCl salt) as a solid. LCMS: (ESI, m/z): 363.3 [M+H]⁺. ¹HNMR (400 MHz, DMSO-d6) δ ppm 8.46 (s, 1H) 8.39 (s, 1H) 7.97 (d, J=4.77 Hz, 2H) 7.05 (s, 1H) 4.78 (dt, J=14.79, 7.52 Hz, 1H) 3.44 (br d, J=12.84 Hz, 2H) 3.06-3.18 (m, 2H) 2.66 (s, 3H) 2.54 (s, 3H) 2.23-2.37 (m, 4H)

### Example 43: Synthesis of Compound 155

### Synthesis of Intermediate C79

[chemical structure]

[0325] To a solution of 5-bromo-7-methoxy-2H-indazole (EVAL-0123-0042-4, 4.50 g, 19.8 mmol, 1 eq) and tert-butyl 4-methylsulfonyloxypiperidine-1-carboxylate (16.6 g, 59.46 mmol, 3 eq) in DMF (90.0 mL) was added Cs₂CO₃ (32.3 g, 99.1 mmol, 5 eq) and KI (9.87 g, 59.5 mmol, 3 eq). The mixture was stirred at 110° C. for 12 hrs. TLC (petroleum ether/ethyl acetate=5/1, Rf=0.5) showed that the starting material was consumed and a new major spot was generated. The reaction mixture was cooled to 25° C. and then diluted with H₂O (100 mL) and extracted with ethyl acetate (3×100 mL). The combined organic layers were washed with brine (3×100 mL), dried over Na₂SO₄, filtered and concentrated under reduced pressure to give a residue. The residue was purified by column chromatography (SiO₂, 30% of ethyl acetate in petroleum ether) to give tert-butyl 4-(5-bromo-7-methoxy-indazol-2-yl)piperidine-1-carboxylate (2.60 g, 32.1%) as an oil. LCMS: (ESI, m/z): 409.9, 411.9 [M+H]⁺. ¹HNMR (400 MHz, CDCl₃) δ ppm 7.85 (s, 1H) 7.39 (d, J=1.43 Hz, 1H) 6.64 (d, J=1.31 Hz, 1H) 4.57 (tt, J=11.71, 4.02 Hz, 1H) 4.32 (br d, J=3.10 Hz, 2H) 4.01 (s, 3H) 2.84-3.01 (m, 2H) 2.24 (br dd, J=12.16, 2.26 Hz, 2H) 2.06-2.16 (m, 2H) 1.49 (s, 9H)

### Synthesis of Intermediate C80

[chemical structure]

[0326] To a solution of tert-butyl 4-(5-bromo-7-methoxy-indazol-2-yl)piperidine-1-carboxylate (400 mg, 975 umol, 1 eq) and 4,4,5,5-tetramethyl-2-(4,4,5,5-tetramethyl-1,3,2-dioxaborolan-2-yl)-1,3,2-dioxaborolane (371 mg, 1.46 mmol, 1.5 eq) in dioxane (8.00 mL) was added Pd(dppf)Cl₂ (35.8 mg, 48.7 umol, 0.05 eq) and KOAc (191 mg, 1.95 mol, 2 eq). The mixture was stirred at 100° C. for 12 hrs. The reaction mixture filtered and concentrated under reduced pressure to give tert-butyl 4-(7-methoxy-5-(4,4,5,5-tetramethyl-1,3,2-dioxaborolan-2-yl)-2H-indazol-2-yl)piperidine-1-carboxylate (400 mg, 90%) as an oil. The crude product was used into the next step without further purification. LCMS: (ES, m/z): 458.3 [M+H]⁺.

### Synthesis of Intermediate C81

[chemical structure]

[0327] A mixture of tert-butyl 4-[7-methoxy-5-(4,4,5,5-tetramethyl-1,3,2-dioxaborolan-2-yl)indazol-2-yl]piperidine-1-carboxylate (400 mg, 874 umol, 1 eq), 6-chloro-2,8-dimethyl-imidazo[1,2-b]pyridazine (159 mg, 875 umol, 1 eq), ditert-butyl(cyclopentyl)phosphane;dichloropalladium;iron (282 mg, 437 umol, 0.5 eq) and Na₂CO₃ (185 mg, 1.75 mmol, 2 eq) in dioxane (14.0 mL) and H₂O (2.80 mL) was degassed and purged with N₂ for 3 times, and then the mixture was stirred at 80° C. for 2 hrs under N₂ atmosphere. The reaction mixture diluted with H₂O (20.0 mL) and extracted with ethyl acetate (3×20.0 mL). The combined organic layers were washed with brine (3×20.0 mL), dried over Na₂SO₄, filtered and concentrated under reduced pressure to give a residue. The residue was purified by column chromatography (SiO₂, 30% of ethyl acetate in petroleum ether) to give tert-butyl 4-(5-(2,8-dimethylimidazo[1,2-b]pyridazin-6-yl)-7-methoxy-2H-indazol-2-yl)piperidine-1-carboxylate (250 mg, 59.9%) as a solid. LCMS: (ESI, m/z): 477.0 [M+H]⁺. ¹HNMR (400 MHz, CDCl₃) δ ppm 7.96 (s, 1H) 7.69-7.75 (m, 2H) 7.22 (s, 1H) 4.57 (tt, J=11.67, 3.77 Hz, 1H) 4.21-4.39 (m, 2H) 4.10 (s, 3H) 2.80-2.97 (m, 2H) 2.67 (s, 3H) 2.50 (s, 3H) 2.19-2.30 (m, 2H) 2.09 (qd, J=12.28, 4.05 Hz, 2H) 1.45 (s, 9H)

### Synthesis of Compound 155

[chemical structure]

[0328] To a solution of tert-butyl 4-[5-(2,8-dimethylimidazo[1,2-b]pyridazin-6-yl)-6-methoxy-indazol-2-yl]piperidine-1-carboxylate (250 mg, 524 umol, 1 eq) in HCl/dioxane (2.00 mL) was stirred at 25° C. for 1 hr. The reaction mixture was filtered and the filtrate was concentrated under reduced pressure to give 6-(7-methoxy-2-(piperidin-4-yl)-2H-indazol-5-yl)-2, 8-dimethylimidazo [1,2-b]pyridazine (24.9 mg, 12.6%) as a solid. LCMS: (ESI, m/z): 377.3 [M+H]⁺. ¹HNMR (400 MHz, DMSO-d₆) δ ppm 8.56 (s, 1H) 8.32 (d, J=0.86 Hz, 1H) 8.25 (s, 1H) 8.10 (d, J=0.86 Hz, 1H) 7.30 (d, J=0.86 Hz, 1H) 4.77-4.94 (m, 1H) 3.99 (s, 3H) 3.46 (br d, J=12.96 Hz, 2H) 3.05-3.19 (m, 2H) 2.65 (s, 3H) 2.54 (s, 3H) 2.30 (br d, J=3.18 Hz, 4H)

### Example 44: Synthesis of Compound 156

[chemical structure]

[0329] To a solution of tert-butyl 4-[5-(2,8-dimethylimidazo[1,2-b]pyridazin-6-yl)-7-methoxy-indazol-2-yl]piperidine-1-carboxylate (210 mg, 441 umol, 1 eq) in dichloromethane (1.00 mL) was added BCl₃ (1M in DCM, 5.40 mL). The mixture was stirred at 25° C. for 3 hrs. The reaction mixture was concentrated under reduced pressure to give a residue. The crude product purified by pre-HPLC (column: Phenomenex Luna 80*30 mm*3 um; mobile phase: [water(HCl)-MeOH]; B %: 15%-35%, 8 min) to give 5-(2,8-dimethylimidazo[1,2-b]pyridazin-6-yl)-2-(piperidin-4-yl)-2H-indazol-7-ol (37.5 mg, 23.4%) as a solid. LCMS: (ESI, m/z): 363.1 [M+H]⁺. ¹HNMR (400 MHz, DMSO-d₆) δ ppm 8.52 (s, 1H) 8.28 (s, 1H) 8.20 (s, 1H) 7.98 (d, J=0.73 Hz, 1H) 7.27 (d, J=0.98 Hz, 1H) 4.75-4.95 (m, 1H) 3.47 (br d, J=12.84 Hz, 2H) 3.04-3.20 (m, 2H) 2.64 (s, 3H) 2.54 (s, 3H) 2.32 (br d, J=2.81 Hz, 4H)

### Example 45: Synthesis of Compound 157

[chemical structure]

[0330] To a solution of tert-butyl 4-[7-fluoro-5-(4,4,5,5-tetramethyl-1,3,2-dioxaborolan-2-yl)indazol-2-yl]piperidine-1-carboxylate (100 mg, 224 umol, 1 eq) in EtOH (1.00 mL) and H₂O (250 uL) was added 2-chloro-6-methyl-1,5-naphthyridine (40.1 mg, 224 umol, 1 eq), K₃PO₄ (95.3 mg, 449 umol, 2 eq) and XPHOS-PD-G₂ (17.6 mg, 22.4 umol, 0.1 eq) under N₂ atmosphere. The mixture was stirred at 80° C. for 12 hrs. TLC (petroleum ether/ethyl acetate=1/1, Rf=0.55) showed the starting material was consumed and a new major spot was generated. The reaction mixture was quenched by addition water (5.00 mL) at 0° C. The reaction mixture was filtered and the filter cake was washed with 10.0 mL of ethyl acetate, dried in vacuum to give residue. The residue was triturated with ethyl acetate at 25° C. for 10 min. The reaction mixture was filtered and the filter cake was washed with 10.0 mL of ethyl acetate, dried in vacuum to give a crude product. The crude product was dissolved in EtOAc (2.00 mL) and then HCl/EtOAc (4 M, 1.00 mL) was added. The mixture was stirred at 25° C. for 2 hrs. TLC (ethyl acetate, Rf=0.10) showed the starting material was consumed and a new major spot was generated. The reaction mixture was concentrated under reduced pressure to remove ethyl acetate. The crude product was purified by re-crystallization from MeOH (10.0 mL) at 25° C. to give 2-[7-fluoro-2-(4-piperidyl) indazol-5-yl]-6-methyl-1,5-naphthyridine (36.1 mg, 38.5%) as a solid. LCMS: (ESI, m/z): 362.1 [M+H]^{+ 1}H NMR (DMSO-d₆, 400 MHz) δ ppm 9.18 (br d, 1H, J=8.9 Hz) 8.8-9.0 (m, 1H) 8.79 (d, 1H, J=2.7 Hz) 8.5-8.6 (m, 4H) 8.09 (dd, 1H, J=1.2, 13.5 Hz) 7.87 (d, 1H, J=8.7 Hz) 4.9-5.0 (m, 1H), 3.48 (br d, 2H, J=12.9 Hz) 3.1-3.3 (m, 2H) 2.82 (s, 3H) 2.3-2.4 (m, 4H) ¹⁹F NMR (DMSO-d₆, 376 MHz) δ ppm −128.47 (s, 1F)

### Example 46: Synthesis of Compound 158

[chemical structure]

[0331] To a solution of tert-butyl 4-[7-fluoro-5-(4,4,5,5-tetramethyl-1,3,2-dioxaborolan-2-yl)indazol-2-yl]piperidine-1-carboxylate (200 mg, 449 umol, 1 eq) in EtOH (1.00 mL) and H₂O (250 uL) was added 7-chloroisoquinoline (73.4 mg, 449 umol, 1 eq), K₃PO₄ (190 mg, 898 umol, 2 eq) and XPHOS-PD-G₂ (35.3 mg, 44.9 umol, 0.1 eq) under N₂ atmosphere. The mixture was stirred at 80° C. for 12 hrs. TLC (petroleum ether/ethyl acetate=1/1, Rf=0.55) showed the starting material was consumed and a new major spot was generated. The reaction mixture was quenched by addition water (5.00 mL) at 0° C. and the reaction mixture was filtered and the filter cake was washed with 10.0 mL of ethyl acetate, dried in vacuum to give residue. The residue was triturated with ethyl acetate at 25° C. for 10 min. The reaction mixture was filtered and the filter cake was washed with 10.0 mL of ethyl acetate, dried in vacuum to give a crude product. The crude product was added EtOAc (2.00 mL) and then HCl/EtOAc (4 M, 1.00 mL) was added under N₂ atmosphere. The mixture was stirred at 25° C. for 2 hrs. TLC (ethyl acetate, Rf=0.10) showed the starting material was consumed and a new major spot was generated. The reaction mixture was concentrated under reduced pressure to remove ethyl acetate. The crude product was purified by re-crystallization from MeOH (10.0 mL) at 25° C. to give 7-[7-fluoro-2-(4-piperidyl)indazol-5-yl]isoquinoline (99.6 mg, 50.7%) as a solid. LCMS: (ESI, m/z): 347.1 [M+H]^{+ 1}H NMR (DMSO-d₆, 400 MHz) δ ppm 9.80 (s, 1H) 9.3-9.4 (m, 1H) 9.0-9.2 (m, 1H) 8.85 (s, 1H) 8.75 (d, 1H, J=2.7 Hz) 8.67 (d, 1H, J=6.3 Hz) 8.58 (dd, 1H, J=1.8, 8.8 Hz) 8.44 (d, 1H, J=6.3 Hz) 8.38 (d, 1H, J=8.8 Hz) 8.15 (d, 1H, J=1.2 Hz) 7.67 (dd, 1H, J=1.3, 13.1 Hz) 4.9-5.0 (m, 1H) 3.46 (br d, 2H, J=12.9 Hz) 3.1-3.2 (m, 2H) 2.3-2.5 (m, 4H) ¹⁹F NMR (DMSO-d₆, 376 MHz) δ ppm −127.99 (s, 1F)

### Example 47: Synthesis of Compound 159

### Synthesis of Intermediate C83

[chemical structure]

[0332] To a solution of 5-bromo-6-methoxy-2H-indazole (2.00 g, 8.81 mmol, 1 eq) and tert-butyl 4-methylsulfonyloxypiperidine-1-carboxylate (7.38 g, 26.4 mmol, 3 eq) in DMF (80.0 mL) was added Cs₂CO₃ (14.4 g, 44.0 mmol, 5 eq) and KI (4.39 g, 26.4 mmol, 3 eq). The mixture was stirred at 110° C. for 12 hrs. TLC (petroleum ether/ethyl acetate=5/1, Rf=0.5) showed that the starting material was consumed and a new major spot was generated. The reaction mixture was quenched with water (50.0 mL) at 20° C. and extracted with ethyl acetate (5×50.0 mL). The combined organic layer was dried over Na₂SO₄, filtered and the filtrate was concentrated under reduced pressure to give crude product. The crude product was purified by column chromatography on silica gel (SiO₂, 29% of ethyl acetate in petroleum ether) to give tert-butyl 4-(5-bromo-6-methoxy-2H-indazol-2-yl) piperidine-1-carboxylatenonane-9-carboxylate (1.10 g, 30.4%) as an oil. LCMS: (ES, m/z): 410.1, 412.1 [M+H]⁺. ¹HNMR (400 MHz, CDCl₃) δ ppm 7.85 (d, J=15.65 Hz, 2H) 7.03 (s, 1H) 4.49 (tt, J=11.51, 4.02 Hz, 1H) 4.32 (br s, 2H) 3.94 (s, 3H) 2.83-3.05 (m, 2H) 2.23 (br d, J=11.13 Hz, 2H) 2.07 (qd, J=12.19, 4.16 Hz, 2H) 1.49 (s, 9H)

### Synthesis of Intermediate C84

[chemical structure]

[0333] A mixture of tert-butyl 4-(5-bromo-6-methoxy-indazol-2-yl)piperidine-1-carboxylate (1.10 g, 2.68 mmol, 1 eq), 4,4,5,5-tetramethyl-2-(4,4,5,5-tetramethyl-1,3,2-dioxaborolan-2-yl)-1,3,2-dioxaborolane (1.02 g, 4.02 mmol, 1.5 eq), Pd(dppf)Cl₂ (98.1 mg, 134 umol, 0.05 eq) and KOAc (526 mg, 5.36 mmol, 2 eq) in dioxane (10.0 mL) was degassed and purged with N₂ for 3 times, and then the mixture was stirred at 100° C. for 12 hrs under N₂ atmosphere. The reaction mixture was cooled to 25° C. and quenched with water (20.0 mL), then extracted with ethyl acetate (5×20.0 mL). The combined organic layer was dried over Na₂SO₄, filtered and the filtrate was concentrated under reduced pressure. The crude product tert-butyl 4-(6-methoxy-5-(4,4,5,5-tetramethyl-1,3,2-dioxaborolan-2-yl)-2H-indazol-2-yl)piperidine-1-carboxylate (1.10 g, 90%) was obtained as a solid, which was used directly into the next step without further purification. LCMS: (ES, m/z): 458.3 [M+H]⁺.

### Synthesis of Intermediate C85

[chemical structure]

[0334] A mixture of tert-butyl 4-[6-methoxy-5-(4,4,5,5-tetramethyl-1,3,2-dioxaborolan-2-yl)indazol-2-yl]piperidine-1-carboxylate (1.10 g, 2.41 mmol, 1 eq), 6-chloro-2,8-dimethyl-imidazo[1,2-b]pyridazine (437 mg, 2.41 mmol, 1 eq), ditert-butyl(cyclopentyl)phosphane;dichloropalladium;iron (78.4 mg, 120 umol, 0.05 eq) and Na₂CO₃ (510 mg, 4.81 mmol, 2 eq) in H₂O (8.00 mL) and dioxane (40.0 mL) was degassed and purged with N₂ for 3 times, and then the mixture was stirred at 80° C. for 2 hrs under N₂ atmosphere. The reaction mixture was quenched with water (50.0 mL) and extracted with ethyl acetate (3×50.0 mL). The combined organic layer was dried over Na₂SO₄, filtered and the filtrate was concentrated under reduced pressure to give crude product which was purified by column chromatography on silica gel (SiO₂, 30% of ethyl acetate in petroleum ether) to give tert-butyl 4-(5-(2,8-dimethylimidazo[1,2-b]pyridazin-6-yl)-6-methoxy-2H-indazol-2-yl)piperidine-1-carboxylate (600 mg, 52.3%) as a solid. LCMS: (ESI, m/z): 477.2 [M+H]⁺. ¹HNMR (400 MHz, CDCl₃) δ ppm 7.95 (s, 1H) 7.83 (s, 1H) 7.74 (s, 1H) 7.17 (s, 1H) 7.12 (s, 1H) 4.53 (tt, J=11.51, 3.96 Hz, 1H) 4.25-4.44 (m, 2H) 3.90 (s, 3H) 2.96 (brt, J=11.86 Hz, 2H) 2.68 (s, 3H) 2.51-2.56 (m, 3H) 2.22-2.30 (m, 2H) 2.08-2.17 (m, 2H) 1.50 (s, 9H)

### Synthesis of Compound 159

[chemical structure]

[0335] To a solution of tert-butyl 4-[5-(2,8-dimethylimidazo[1,2-b]pyridazin-6-yl)-6-methoxy-indazol-2-yl]piperidine-1-carboxylate (500 mg, 105 umol, 1 eq) in dioxane (1.00 mL) was added HCl/dioxane (1.00 mL). The mixture was stirred at 25° C. for 2 hrs The reaction mixture was concentrated under reduced pressure to give a residue. The residue was triturated with dichloromethane at 25° C. for 30 min to give 6-(6-methoxy-2-(piperidin-4-yl)-2H-indazol-5-yl)-2,8-dimethylimidazo[1,2-b]pyridazine (21.0 mg, 53.1%) as a solid. LCMS: (ESI, m/z): 377.3 [M+H]⁺. ¹HNMR (400 MHz, DMSO-d₆) δ ppm 8.47 (s, 1H) 8.35 (s, 1H) 7.94 (s, 1H) 7.83 (s, 1H) 7.16 (s, 1H) 4.74-4.87 (m, 1H) 3.84 (s, 3H) 3.45 (br d, J=12.84 Hz, 2H) 3.05-3.20 (m, 2H) 2.64 (s, 3H) 2.52 (s, 3H) 2.19-2.35 (m, 4H)

### Example 48: Synthesis of Compound 161

[chemical structure]

[0336] To a solution of tert-butyl 4-[7-fluoro-5-(4,4,5,5-tetramethyl-1,3,2-dioxaborolan-2-yl)indazol-2-yl]piperidine-1-carboxylate (100 mg, 224 umol, 1 eq) in EtOH (1.00 mL) and H₂O (250 uL) was added 6-chloroisoquinoline (36.7 mg, 224 umol, 1 eq), K₃PO₄ (95.3 mg, 449 umol, 2 eq) and XPHOS-PD-G₂ (17.6 mg, 22.4 umol, 0.1 eq) under N₂ atmosphere. The mixture was stirred at 80° C. for 12 hrs. TLC (petroleum ether/ethyl acetate=1/1, Rf=0.55) showed the starting material was consumed and a new major spot was generated. The reaction mixture was quenched by addition water (5.00 mL) at 0° C. and the reaction mixture was filtered and the filter cake was washed with 10.0 mL of ethyl acetate, dried in vacuum to give residue. The residue was triturated with ethyl acetate at 25° C. for 10 min. The reaction mixture was filtered and the filter cake was washed with 10.0 mL of ethyl acetate, dried in vacuum to give a crude product. The crude product was added EtOAc (2.00 mL) and then HCl/EtOAc (4 M, 1.00 mL) was added under N₂ atmosphere. The mixture was stirred at 25° C. for 2 hrs. TLC (ethyl acetate, Rf=0.10) showed the starting material was consumed and a new major spot was generated. The reaction mixture was concentrated under reduced pressure to remove ethyl acetate. The crude product was purified by recrystallization from MeOH (10.0 mL) at 25° C. to give 6-[7-fluoro-2-(4-piperidyl) indazol-5-yl]isoquinoline (43.6 mg, 46.3%) as a solid. LCMS: (ESI, m/z): 347.1 [M+H]^{+ 1}H NMR (DMSO-d₆, 400 MHz) δ ppm 9.77 (s, 1H) 9.14 (br d, 1H, J=10.8 Hz) 8.8-9.0 (m, 1H) 8.77 (d, 1H, J=2.7 Hz) 8.6-8.7 (m, 2H) 8.53 (d, 1H, J=8.7 Hz) 8.3-8.4 (m, 2H) 8.24 (s, 1H) 7.74 (dd, 1H, J=1.1, 13.2 Hz) 4.8-5.1 (m, 1H) 3.48 (br d, 2H, J=12.4 Hz) 3.0-3.2 (m, 2H) 2.3-2.4 (m, 4H) ¹⁹F NMR (DMSO-d₆, 376 MHz) δ ppm −128.00 (s, 1F)

### Example 49: Synthesis of Compound 162

[chemical structure]

[0337] To a solution of tert-butyl 4-[7-fluoro-5-(4,4,5,5-tetramethyl-1,3,2-dioxaborolan-2-yl)indazol-2-yl]piperidine-1-carboxylate (200 mg, 449 umol, 1 eq) in EtOH (1.00 mL) and H₂O (250 uL) was added 6-chloroquinoline (73.4 mg, 449 umol, 1 eq), K₃PO₄ (190 mg, 898 umol, 2 eq) and XPHOS-PD-G₂ (35.3 mg, 44.9 umol, 0.1 eq) under N₂ atmosphere. The mixture was stirred at 80° C. for 12 hrs. TLC (petroleum ether/ethyl acetate=1/1, Rf=0.55) showed the starting material was consumed and a new major spot was generated. The reaction mixture was quenched by addition water (5.00 mL) at 0° C. and the reaction mixture was filtered and the filter cake was washed with 10.0 mL of ethyl acetate, dried in vacuum to give residue. The residue was triturated with ethyl acetate at 25° C. for 10 min. The reaction mixture was filtered and the filter cake was washed with 10.0 mL of ethyl acetate, dried in vacuum to give a crude product. The crude product was added EtOAc (2.00 mL) and then HCl/EtOAc (4 M, 1.00 mL) was added under N₂ atmosphere. The mixture was stirred at 25° C. for 2 hrs. TLC (ethyl acetate, Rf=0.10) showed the starting material was consumed and a new major spot was generated. The reaction mixture was concentrated under reduced pressure to remove ethyl acetate. The crude product was purified by re-crystallization from MeOH (10.0 mL) at 25° C. to give 6-[7-fluoro-2-(4-piperidyl) indazol-5-yl]quinoline (100 mg, 53.3%) as a solid. LCMS: (ESI, m/z): 347.1 [M+H]^{+ 1}H NMR (DMSO-d₆, 400 MHz) δ ppm 9.1-9.3 (m, 2H), 8.8-9.0 (m, 2H), 8.73 (d, 1H, J=2.7 Hz), 8.60 (s, 1H), 8.4-8.5 (m, 1H), 8.3-8.4 (m, 1H), 8.12 (s, 1H), 7.9-8.0 (m, 1H), 7.68 (d, 1H, J=13.2 Hz), 4.96 (tt, 1H, J=4.8, 10.0 Hz), 3.4-3.6 (m, 2H), 3.0-3.2 (m, 2H), 2.3-2.4 (m, 4H) ¹⁹F NMR (DMSO-d₆, 376 MHz) δ ppm −128.20 (s, 1F)

### Example 50: Synthesis of Compound 163

[chemical structure]

[0338] To a solution of tert-butyl 4-[7-fluoro-5-(4,4,5,5-tetramethyl-1,3,2-dioxaborolan-2-yl)indazol-2-yl]piperidine-1-carboxylate (100 mg, 224 umol, 1 eq) in EtOH (1.00 mL) and H₂O (250 uL) was added 6-chloro-2-methyl-quinoline (39.8 mg, 224 umol, 1 eq) and K₃PO₄ (95.3 mg, 449 umol, 2 eq), XPHOS-PD-G₂ (17.6 mg, 22.4 umol, 0.1 eq) under N₂ atmosphere. The mixture was stirred at 80° C. for 12 hrs. TLC (petroleum ether/ethyl acetate=1/1, Rf=0.55) showed the starting material was consumed and a new major spot was generated. The reaction mixture was quenched by addition water (5.00 mL) at 0° C. and the reaction mixture was filtered and the filter cake was washed with 10.0 mL of ethyl acetate, dried in vacuum to give residue. The residue was triturated with ethyl acetate at 25° C. for 10 min. The reaction mixture was filtered and the filter cake was washed with 10.0 mL of ethyl acetate, dried in vacuum to give a crude product. The crude product was added EtOAc (2.00 mL) and then HCl/EtOAc (4 M, 1.00 mL) was added under N₂ atmosphere. The mixture was stirred at 25° C. for 2 hrs. TLC (ethyl acetate, Rf=0.10) showed the starting material was consumed and a new major spot was generated. The reaction mixture was concentrated under reduced pressure to remove ethyl acetate. The crude product was purified by re-crystallization from MeOH (10.0 mL) at 25° C. to give 6-[7-fluoro-2-(4-piperidyl) indazol-5-yl]-2-methyl-quinoline (13.7 mg, 16.1%, 95.4% purity) as a solid. LCMS: (ESI, m/z): 361.1 [M+H]^{+ 1}H NMR (DMSO-d₆, 400 MHz) δ ppm 9.20 (br d, 1H, J=9.4 Hz) 8.8-9.0 (m, 2H) 8.73 (d, 1H, J=2.7 Hz) 8.61 (br s, 1H) 8.3-8.5 (m, 2H) 8.11 (d, 1H, J=1.0 Hz) 7.90 (br d, 1H, J=8.7 Hz) 7.67 (dd, 1H, J=1.2, 13.1 Hz) 4.9-5.0 (m, 1H) 3.48 (br d, 2H, J=12.6 Hz) 3.1-3.2 (m, 2H) 2.95 (s, 3H) 2.3-2.4 (m, 4H) ¹⁹F NMR (DMSO-d₆, 376 MHz) δ ppm −128.16 (s, 1F)

### Example 51: Synthesis of Compound 212

### Synthesis of Intermediate C86

[chemical structure]

[0339] To a solution of 7-fluoro-5-(4,4,5,5-tetramethyl-1,3,2-dioxaborolan-2-yl)-2H-indazole (1.00 g, 3.82 mmol, 1 eq) in EtOH (10.0 mL) and H₂O (2.50 mL) was added 6-chloro-2,8-dimethyl-imidazo[1,2-b]pyridazine (692 mg, 3.82 mmol, 1 eq), K₃PO₄ (1.62 g, 7.63 mmol, 2 eq) and XPHOS-PD-G₂ (300 mg, 381 umol, 0.1 eq) under N₂ atmosphere. The mixture was stirred at 80° C. for 12 hrs. TLC (petroleum ether/ethyl acetate=1/1, Rf=0.55) showed the starting material was consumed and a new major spot was generated. The reaction mixture was quenched by addition water 20.0 mL at 0° C., the reaction mixture was filtered and the filter cake was washed with 10.0 mL of ethyl acetate, dried in vacuum to afford product. The crude product was triturated with ethyl acetate at 25° C. for 10 min. The reaction mixture was filtered and the filter cake was washed with 10.0 mL of ethyl acetate, dried in vacuum to give 6-(7-fluoro-2H-indazol-5-yl)-2,8-dimethyl-imidazo[1,2-b]pyridazine (2.50 g, 69.8%) as a solid. LCMS: (ESI, m/z): 282.2 [M+H]^{+ 1}H NMR (DMSO-d₆, 400 MHz) δ ppm 13.6-14.1 (m, 1H) 8.3-8.4 (m, 2H) 8.03 (d, 1H, J=0.7 Hz) 7.8-7.9 (m, 1H) 7.74 (d, 1H, J=1.0 Hz) 2.60 (d, 3H, J=0.7 Hz) 2.4-2.4 (m, 3H) ¹⁹F NMR (DMSO-d₆, 376 MHz) δ ppm −129.99 (s, 1F)

### Synthesis of Intermediate C87

[chemical structure]

[0340] To a solution of 6-(7-fluoro-2H-indazol-5-yl)-2,8-dimethyl-imidazo[1,2-b]pyridazine (400 mg, 1.42 mmol, 1 eq) and tert-butyl 4-(bromomethyl)piperidine-1-carboxylate (1.19 g, 4.26 mmol, 3 eq) in DMF (5.00 mL) was added KI (471 mg, 2.84 mmol, 2 eq) and Cs₂CO₃ (2.31 g, 7.10 mmol, 5 eq) under N₂ atmosphere. The mixture was stirred at 100° C. for 12 hrs. TLC (ethyl acetate, Rf=0.6) showed the starting material was consumed and a new major spot was generated. The reaction mixture was filtered and the filtrate was concentrated under reduced pressure to remove N,N-dimethyl-formamide. The residue was purified by prep-HPLC (column: Phenomenex C18 75*30 mm*3 um; mobile phase: [water(NH₄HCO₃)—CH₃CN]; B %: 45%-75%, 8 min) to give tert-butyl 4-[[5-(2,8-dimethylimidazo[1,2-b]pyridazin-6-yl)-7-fluoro-indazol-2-yl]methyl]piperidine-1-carboxylate (100 mg, 13.2%) as a solid. LCMS: (ESI, m/z): 479.3 [M+H]^{+ 1}H NMR (CDCl₃, 400 MHz) δ ppm 8.05 (d, 1H, J=2.5 Hz) 8.01 (d, 1H, J=1.1 Hz) 7.78 (s, 1H) 7.69 (dd, 1H, J=1.2, 12.5 Hz) 7.31 (br s, 1H) 4.35 (d, 2H, J=7.3 Hz) 4.0-4.3 (m, 2H) 2.6-2.8 (m, 5H) 2.57 (s, 3H) 2.3-2.4 (m, 1H) 1.61 (br d, 2H, J=4.6 Hz) 1.48 (s, 9H) 1.2-1.4 (m, 2H) ¹⁹F NMR (CDCl₃, 376 MHz) δ ppm −127.49 (s, 1F)

### Synthesis of Compound 212

[chemical structure]

[0341] To a solution of tert-butyl 4-[[5-(2, 8-dimethylimidazo [1,2-b]pyridazin-6-yl)-7-fluoro-indazol-2-yl]methyl]piperidine-1-carboxylate (100 mg, 208 umol, 1 eq) in EtOAc (2.00 mL) was added HCl/EtOAc (4 M, 800 uL) under N₂ atmosphere. The mixture was stirred at 25° C. for 2 hrs. TLC (petroleum ether/ethyl acetate=1/1, Rf=0.00) showed the starting material was consumed and a new major spot was generated. The reaction mixture was concentrated under reduced pressure to remove ethyl acetate. The crude product was purified by re-crystallization from MeOH (10.0 mL) at 25° C. to give 6-[7-fluoro-2-(4-piperidylmethyl) indazol-5-yl]-2,8-dimethyl-imidazo[1,2-b]pyridazine (78.1 mg, 84.1%) as a solid. LCMS: (ESI, m/z): 379.1 [M+H]^{+ 1}H NMR (MeOD-d₄, 400 MHz) δ ppm 8.63 (d, 1H, J=2.6 Hz) 8.43 (d, 1H, J=1.2 Hz) 8.30 (dd, 2H, J=1.0, 10.8 Hz) 7.85 (dd, 1H, J=1.2, 12.8 Hz) 4.52 (d, 2H, J=7.1 Hz) 3.43 (br d, 2H, J=12.8 Hz) 3.01 (dt, 2H, J=2.6, 12.9 Hz) 2.78 (d, 3H, J=0.9 Hz) 2.65 (d, 3H, J=0.9 Hz) 2.48 (qtd, 1H, J=3.6, 7.6, 11.3 Hz) 1.86 (br d, 2H, J=13.6 Hz) 1.5-1.7 (m, 2H) ¹⁹F NMR (MeOD-d₄, 376 MHz) δ ppm −129.65 (s, 1F)

### Example 52: Synthesis of Compound 165

### Synthesis of Intermediate C88

[chemical structure]

[0342] To a solution of tert-butyl 4-[7-fluoro-5-(4,4,5,5-tetramethyl-1,3,2-dioxaborolan-2-yl)indazol-2-yl]piperidine-1-carboxylate (200 mg, 449 umol, 1 eq) in EtOH (10.0 mL) and H₂O (2.50 mL) was added 6-bromo-2-methyl-quinazoline (100 mg, 449 umol, 1 eq), K₃PO₄ (190 mg, 898 umol, 2 eq) and XPHOS-PD-G₂ (35.3 mg, 44.9 umol, 0.1 eq) under N₂ atmosphere. The mixture was stirred at 80° C. for 12 hrs. TLC (petroleum ether/ethyl acetate=1/1, Rf=0.65) showed the starting material was consumed and a new major spot was generated. The reaction mixture was quenched by addition water (5.00 mL) at 0° C. and the reaction mixture was filtered and the filter cake was washed with 10.0 mL of ethyl acetate, dried in vacuum to give residue. The residue was triturated with ethyl acetate at 25° C. for 10 min. The reaction mixture was filtered and the filter cake was washed with 10.0 mL of ethyl acetate, dried in vacuum to give tert-butyl 4-[7-fluoro-5-(2-methylquinazolin-6-yl)indazol-2-yl]piperidine-1-carboxylate (200 mg, 96.4%) as a solid. LCMS: (ESI, m/z): 462.3 [M+H]^{+ 1}H NMR (CDCl₃, 400 MHz) δ ppm 9.40 (s, 1H) 8.17 (dd, 1H, J=2.1, 8.8 Hz) 8.09 (dd, 2H, J=2.2, 14.1 Hz) 8.04 (d, 1H, J=8.8 Hz) 7.75 (d, 1H, J=1.2 Hz) 7.34 (dd, 1H, J=1.3, 12.3 Hz) 4.66 (tt, 1H, J=4.0, 11.7 Hz) 4.2-4.6 (m, 2H) 2.9-3.1 (m, 5H) 2.31 (br dd, 2H, J=2.2, 12.2 Hz) 2.1-2.2 (m, 2H) 1.51 (s, 9H) ¹⁹F NMR (CDCl₃, 376 MHz) δ ppm −127.67 (s, 1F)

### Synthesis of Compound 165

[chemical structure]

[0343] To a solution of tert-butyl 4-[7-fluoro-5-(2-methylquinazolin-6-yl) indazol-2-yl]piperidine-1-carboxylate (150 mg, 325 umol, 1 eq) in EtOAc (1.00 mL) was added HCl/EtOAc (4 M, 81.2 uL, 1 eq) under N₂ atmosphere. The mixture was stirred at 25° C. for 6 hrs. TLC (ethyl acetate, Rf=0.10) showed the starting material was consumed and a new major spot was generated. The reaction mixture was concentrated under reduced pressure to remove ethyl acetate. The crude product was purified by re-crystallization from MeOH (10.0 mL) at 25° C. to give 6-[7-fluoro-2-(4-piperidyl) indazol-5-yl]-2-methyl-quinazoline (112 mg, 86%) as a solid. LCMS: (ESI, m/z): 362.2 [M+H]^{+ 1}H NMR (MeOD-d₄, 400 MHz) δ ppm 8.52 (s, 1H), 7.8-8.0 (m, 3H), 7.3-7.4 (m, 2H), 6.21 (s, 1H), 4.97 (br dd, 1H, J=4.9, 9.9 Hz), 3.66 (br d, 2H, J=13.3 Hz), 3.35 (br s, 2H), 2.57 (s, 3H), 2.4-2.5 (m, 4H) ¹⁹F NMR (MeOD-d₄, 376 MHz) δ ppm −130.63 (s, 1F).

### Example 53: Synthesis of Compound 207

### Synthesis of Intermediate C89

[chemical structure]

[0344] Into a 50 mL bottles were added 1-tert-butylpiperidin-4-ol (900 mg, 5.723 mmol, 1 equiv) and TEA (868.71 mg, 8.585 mmol, 1.5 equiv) in DCM (9 mL) at room temperature. To the above mixture was added MsCl (786.63 mg, 6.868 mmol, 1.2 equiv) dropwise over 1 min at 0° C. The resulting mixture was stirred for additional 1 h at room temperature. The reaction was quenched with water at room temperature. The reaction was quenched with NaHCO₃ at room temperature. The resulting mixture was extracted with DCM (3×18 mL). The combined organic layers were washed with NaCl solution (2×20 mL), dried over anhydrous Na₂SO₄. After filtration. The resulting mixture was concentrated under reduced pressure. This resulted in 1-tert-butylpiperidin-4-yl methanesulfonate (800 mg, 59.40%) as a solid. LCMS: (ESI, m/z): 235[M+H]⁺

### Synthesis of Intermediate C90

[chemical structure]

[0345] Into a 50 mL bottles were added 1-tert-butylpiperidin-4-yl methanesulfonate (840 mg, 3.569 mmol, 1.5 equiv) and 5-bromo-7-fluoro-2H-indazole (511.66 mg, 2.379 mmol, 1 equiv) and Cs₂CO₃ (2325.89 mg, 7.138 mmol, 3 equiv) in DMSO (9 mL) at room temperature. The resulting mixture was stirred for additional 16 h at 100° C. The mixture was allowed to cool down to room temperature. The reaction was quenched with H₂O at room temperature. The resulting mixture was extracted with EA (3×20 mL). The combined organic layers were washed with NaCl solution (2×20 mL), dried over anhydrous Na₂SO₄. After filtration, the filtrate was concentrated under reduced pressure. The residue was purified by silica gel column chromatography, eluted with PE/EA (1:1) to afford 5-bromo-2-(1-tert-butylpiperidin-4-yl)-7-fluoroindazole (110 mg) as a solid. LCMS: (ESI, m/z): 353[M+H]⁺

### Synthesis of Compound 207

[chemical structure]

[0346] A solution of 5-bromo-2-(1-tert-butylpiperidin-4-yl)-7-fluoroindazole (90 mg, 0.254 mmol, 1 equiv), Pd(dppf)Cl₂ (20.7 mg, 0.025 mmol, 0.10 equiv), 2,8-dimethylimidazo[1,2-b]pyridazin-6-ylboronic acid (72.78 mg, 0.381 mmol, 1.50 equiv) and K₃PO₄ (134.81 mg, 0.635 mmol, 2.50 equiv) in dioxane (5 mL) and H₂O (1 mL) was stirred for 4 h at 80° C. under nitrogen atmosphere. The mixture was allowed to cool down to room temperature. The resulting mixture was dried over anhydrous Na₂SO₄. After filtration, the filtrate was concentrated under reduced pressure. The residue was purified by silica gel column chromatography, eluted with CH₂Cl₂/MeOH (10:1). The crude product was purified by Chiral-Prep-HPLC with the following conditions: Column, Kinetex EVO C18 Column, 30×150, 5 um; mobile phase, water(10 mmol/L NH₄HCO₃) and ACN (20% ACN up to 55% in 8 min); Detector, UV 220 nm to afford 2-(1-tert-butylpiperidin-4-yl)-5-{2,8-dimethylimidazo[1,2-b]pyridazin-6-yl}-7-fluoroindazole (26.0 mg, 24.09%) as a solid. LCMS: (ESI, m/z): 420[M+H]^{+ 1}H NMR: (400 MHz, DMSO-d₆) δ 8.73 (d, J=2.8 Hz, 1H), 8.28 (d, J=1.3 Hz, 1H), 8.04 (d, J=1.0 Hz, 1H), 7.77-7.69 (m, 2H), 4.52 (s, 1H), 3.16 (d, J=11.0 Hz, 2H), 2.60 (d, J=1.1 Hz, 3H), 2.40 (d, J=0.8 Hz, 3H), 2.25 (t, J=11.3 Hz, 2H), 2.16-2.04 (m, 4H), 1.08 (s, 9H).

### Example 54: Synthesis of Compound 143

### Synthesis of Intermediate C92

[chemical structure]

[0347] To a mixture of tert-butyl 4-[7-fluoro-5-(4,4,5,5-tetramethyl-1,3,2-dioxaborolan-2-yl)indazol-2-yl]piperidine-1-carboxylate (0.30 g, 673 umol, 1.50 eq) and 5-chloro-2-methyl-pyrazolo [4,3-b]pyridine (75.2 mg, 449 umol, 1.00 eq) in dioxane (2.40 mL) was added a solution of K₂CO₃ (124 mg, 898 umol, 2.00 eq) in H₂O (0.600 mL). Then, 1,1-bis(diphenylphosphino)ferrocene]dichloropalladium(II) (65.7 mg, 89.8 umol, 0.20 eq) was added to the above mixture under N₂ protection. The reaction mixture was stirred at 80° C. for 1 hr. The reaction mixture was diluted with H₂O (20.0 mL), extracted with ethyl acetate (3×20.0 mL), dried over Na₂SO₄, filtered and concentrated under reduced pressure to give an oil. The oil was purified by column chromatography on silica gel eluted with petroleum ether/ethyl acetate (5/1 to 0/1) to give tert-butyl 4-[7-fluoro-5-(2-methylpyrazolo[4,3-b]pyridin-5-yl)indazol-2-yl]piperidine-1-carboxylate (140 mg, 64.3%) as an oil. LCMS: (ESI, m/z): 451.2 [M+H]⁺. ¹H NMR (400 MHz, METHANOL-d₄) δ ppm 8.52 (d, J=2.75 Hz, 1H) 8.44 (s, 1H) 8.11-8.19 (m, 2H) 7.91 (d, J=9.13 Hz, 1H) 7.79 (dd, J=13.20, 1.19 Hz, 1H) 4.61-4.81 (m, 1H) 4.24-4.34 (m, 5H) 3.04 (br s, 2H) 2.07-2.30 (m, 4H) 1.51 (s, 9H)

### Synthesis of Compound 143

[chemical structure]

[0348] To a solution of tert-butyl 4-[7-fluoro-5-(2-methylpyrazolo[4,3-b]pyridin-5-yl)indazol-2-yl]piperidine-1-carboxylate (140 mg, 310 umol, 1.00 eq) in ethyl acetate (2.30 mL) was added HCl/ethyl acetate (4.00 M, 2.84 mL, 36.5 eq). The reaction mixture was stirred at 25° C. for 1 hr. The reaction mixture was filtered and the filter cake was concentrated in vacuum to give white solid. The white solid was triturated with methyl tert-butyl ether (3.00 mL) to give 5-[7-fluoro-2-(4-piperidyl)indazol-5-yl]-2-methyl-pyrazolo[4,3-b]pyridine (123 mg, 93.4%) as a solid. LCMS: (ESI, m/z): 351.1 [M+H]⁺. ¹H NMR (400 MHz, METHANOL-d4) δ ppm 8.89 (dd, J=9.06, 0.60 Hz, 1H) 8.77-8.82 (m, 2H) 8.44 (d, J=1.43 Hz, 1H) 8.24 (d, J=9.06 Hz, 1H) 7.72 (dd, J=12.16, 1.43 Hz, 1H) 5.06 (dt, J=10.04, 5.05 Hz, 1H) 4.44 (s, 3H) 3.61-3.73 (m, 2H) 3.32-3.39 (m, 2H) 2.44-2.62 (m, 4H)

### Example 55: Synthesis of Compound 138

### Synthesis of Intermediate C93

[chemical structure]

[0349] To a mixture of 2,8-dimethyl-6-(4,4,5,5-tetramethyl-1,3,2-dioxaborolan-2-yl)imidazo[1,2-b]pyridazine (48.6 mg, 178 umol, 3.00 eq) and tert-butyl 4-(5-chloropyrazolo[4,3-b]pyridin-2-yl)piperidine-1-carboxylate (20.0 mg, 59.3 umol, 1.00 eq) in dioxane (0.400 mL) was added a solution of K₂CO₃ (16.4 mg, 118 umol, 2.00 eq) in H₂O (0.100 mL). Then, [1,1-bis(diphenylphosphino)ferrocene]dichloropalladium(II) (8.69 mg, 11.8 umol, 0.200 eq) was added to the above mixture under N₂ protection. The reaction mixture was stirred at 80° C. for 1 hr. The reaction mixture was diluted with water (10.0 mL), and extracted with ethyl acetate (3×10.0 mL). The combined organic layer was washed with brine (2×20.0 mL), dried over Na₂SO₄, filtered and concentrated under reduced pressure to give solid. The solid was purified by column chromatography on silica gel eluted with petroleum ether/ethyl acetate (1/0 to 5/1) to give tert-butyl 4-[5-(2,8-dimethylimidazo[1,2-b]pyridazin-6-yl)pyrazolo[4,3-b]pyridin-2-yl]piperidine-1-carboxylate (50 mg, 37.6%) as an oil. LCMS: (ESI, m/z): 448.2 [M+H]⁺.

### Synthesis of Compound 138

[chemical structure]

[0350] To a solution of tert-butyl 4-[5-(2,8-dimethylimidazo[1,2-b]pyridazin-6-yl)pyrazolo[4,3-b]pyridine-2-yl]piperidine-1-carboxylate (50.0 mg, 111 umol, 1.00 eq) in ethyl acetate (1.00 mL) was added HCl/ethyl acetate (4.00 M, 1.00 mL). The reaction was stirred at 25° C. for 1 hr. The reaction mixture was filtered and the filter cake was purified by prep-HPLC (column: Phenomenex Luna 80*30 mm*3 um; mobile phase: [water (HCl)-acetonitrile]; B %: 1%-50%, 8 min) to give 2,8-dimethyl-6-[2-(4-piperidyl) pyrazolo[4,3-b]pyridin-5-yl]imidazo[1,2-b]pyridazine (17.0 mg, 43.8%) as a solid. LCMS: (EIS, m/z): 348.1 [M+H]⁺. ¹H NMR (400 MHz, D₂O) δ ppm 8.76 (s, 1H) 8.21-8.40 (m, 3H) 8.12 (s, 1H) 5.03-5.09 (m, 1H) 3.72 (br d, J=13.45 Hz, 2H) 3.29-3.43 (m, 2H) 2.73 (s, 3H) 2.43-2.64 (m, 7H).

### Example 56: Synthesis of Compound 137

[chemical structure]

[0351] A suspension of tert-butyl 4-[5-(2,4-dimethyl-1,3-benzoxazol-6-yl)-7-fluoro-indazol-2-yl]piperidine-1-carboxylate (115 mg, 247 umol, 1.00 eq) in HCl/dioxane (4.00 M, 4.60 mL, 74.3 eq) was stirred at 25° C. for 1 hr. The mixture was concentrated under reduced pressure to give white solid. The solid was purified by prep-HPLC (column: Waters Xbridge BEH C18 100*30 mm*10 um; mobile phase: water (NH₄HCO₃)-ACN; B %: 25%-55%, 10 mins) to afford 6-[7-fluoro-2-(4-piperidyl)indazol-5-yl]-2,4-dimethyl-1,3-benzoxazole (20.0 mg, 22.1%) as a solid. LCMS: (ES, m/z): 365.1 [M+H]⁺. ¹H NMR (400 MHz, DMSO-d6) δ ppm 8.59 (d, J=2.74 Hz, 1H) 7.77-7.87 (m, 2H) 7.41-7.55 (m, 2H) 4.53-4.66 (m, 1H) 3.10 (br d, J=12.52 Hz, 2H) 2.65 (br s, 2H) 2.63 (s, 3H) 2.55 (s, 3H) 1.92-2.11 (m, 4H).

### Example 57: Synthesis of Compound 130

### Synthesis of Intermediate C95

[chemical structure]

[0352] To a solution of 5-bromo-2H-indazole-7-carboxylic acid (2 g, 8.30 mmol, 1.00 eq) in ethyl acetate (40.0 mL) was added trimethyloxonium tetrafluoroborate (3.31 g, 22.4 mmol, 2.70 eq). The mixture was stirred at 25° C. for 12 hrs. The reaction mixture was diluted with water (100 mL) and extracted with ethyl acetate (3×30.0 mL), dried over Na₂SO₄, filtered and concentrated under reduced pressure to give 5-bromo-2-methyl-indazole-7-carboxylic acid (2.00 g, 94.5%) as a solid. LCMS: (ESI, m/z): 254.9 [M+H]⁺. ¹H NMR (400 MHz, DMSO-d6) δ ppm 8.50 (s, 1H) 8.26 (d, J=1.91 Hz, 1H) 7.88 (d, J=1.91 Hz, 1H) 4.22 (s, 3H).

### Synthesis of C96

[chemical structure]

[0353] To a solution of 5-bromo-2-methyl-indazole-7-carboxylic acid (2.00 g, 7.84 mmol, 1.00 eq) and benzotriazol-1-yloxy(tripyrrolidin-1-yl)phosphonium hexafluorophosphate (4.90 g, 9.41 mmol, 1.20 eq) in dimethyl formamide (20.0 mL) was added N-ethyl-N-propan-2-ylpropan-2-amine (3.04 g, 23.5 mmol, 4.10 mL, 3.00 eq) and ammonia chloride (838 mg, 15.68 mmol, 2.00 eq). The mixture was stirred at 25° C. for 2 hrs. The reaction mixture was diluted with water (30.0 mL) and extracted with ethyl acetate (3×10.0 mL), dried over Na₂SO₄, filtered. The filtrate was concentrated under reduced pressure to give residue. The solid was triturated with methyl tert-butyl ether (20.0 mL) at 25° C. for 20 mins, then filtered. The filter cake was dried over in vacuum to give 5-bromo-2-methyl-indazole-7-carboxamide (1.40 g, 66.7%) as a solid. LCMS: (ESI, m/z): 253.9 [M+H]⁺.

### Synthesis of Intermediate C97

[chemical structure]

[0354] To a solution of 5-bromo-2-methyl-indazole-7-carboxamide (1.40 g, 5.51 mmol, 1.00 eq) in toluene (56.0 mL) was added phosphorus oxychloride (8.45 g, 55.1 mmol, 5.12 mL, 10.0 eq) dropwise. The mixture was stirred at 120° C. for 12 hrs. The reaction mixture was poured into water (50.0 mL), extracted with ethyl acetate (30.0 mL×3), washed with brine (30.0 mL×3), dried over Na₂SO₄, filtered and concentrated under reduced pressure to give an oil. The oil was purified by column chromatography (SiO₂, petroleum ether/ethyl acetate=10/1 to 1/1) to give 5-bromo-2-methyl-indazole-7-carbonitrile (1.00 g, 73.0%) as a solid. LCMS: (ESI, m/z): 235.9 [M+H]⁺. ¹H NMR (400 MHz, DMSO-d6) δ ppm 8.61 (s, 1H) 8.40 (d, J=1.59 Hz, 1H) 8.07 (d, J=1.59 Hz, 1H) 4.25 (s, 3H).

### Synthesis of Intermediate C99

[chemical structure]

[0355] To a solution of 5-bromo-2-methyl-indazole-7-carbonitrile (70.6 mg, 299 umol, 1.00 eq) and tert-butyl 4-[7-fluoro-5-(4,4,5,5-tetramethyl-1,3,2-dioxaborolan-2-yl)indazol-2-yl]piperidine-1-carboxylate (200 mg, 449 umol, 1.50 eq) in dioxane (2.88 mL) was added a solution of potassium carbonate (82.7 mg, 598 umol, 2.00 eq) of water (0.72 mL) and cyclopentyl(diphenyl)phosphane dichloropalladiumiron (43.8 mg, 59.8 umol, 0.200 eq). The reaction was stirred at 80° C. for 1 hr. The reaction mixture was diluted with water (10 mL), extracted with ethyl acetate (3×10.0 mL), washed with brine (3×10.0 mL), dried over Na₂SO₄, filtered and concentrated under reduced pressure to give an oil. The oil was purified by column chromatography (SiO₂, petroleum ether/ethyl acetate=10/1 to 1/1) to give tert-butyl 4-[5-(7-cyano-2-methyl-indazol-5-yl)-7-fluoro-indazol-2-yl]piperidine-1-carboxylate (130 mg, 86.9%) as a solid. LCMS: (ESI, m/z): 419.1 [M+H]⁺. ¹H NMR (400 MHz, DMSO-d₆) δ=8.69-8.61 (m, 2H), 8.42 (d, J=1.6 Hz, 1H), 8.31 (d, J=1.6 Hz, 1H), 7.93 (d, J=1.1 Hz, 1H), 7.54 (dd, J=1.3, 13.4 Hz, 1H), 4.87-4.69 (m, 1H), 4.27 (s, 3H), 4.19-4.05 (m, 2H), 3.12-2.82 (m, 2H), 2.15 (br d, J=10.3 Hz, 2H), 2.05-1.99 (m, 2H), 1.44 (s, 9H).

### Synthesis of Compound 130

[chemical structure]

[0356] To a solution of tert-butyl 4-[5-(7-cyano-2-methyl-indazol-5-yl)-7-fluoro-indazol-2-yl]piperidine-1-carboxylate (125 mg, 263 umol, 1.00 eq) in dioxane (2.48 mL) was added HCl/dioxane (2.48 mL). The mixture was stirred at 25° C. for 1 hr. The reaction mixture was filtered to give a yellow solid, and the filter cake was dried in vacuum to give 5-[7-fluoro-2-(4-piperidyl)indazol-5-yl]-2-methyl-indazole-7-carbonitrile (60.0 mg, 52.2%) as a solid. LCMS: (ESI, m/z): 375.2 [M+H]⁺. ¹H NMR (400 MHz, deuterium oxide) δ ppm 8.00 (br d, J=1.75 Hz, 1H) 7.82 (s, 1H) 7.25 (s, 1H) 7.03 (s, 1H) 6.74 (s, 1H) 6.28 (br d, J=13.13 Hz, 1H) 4.64 (br t, J=11.26 Hz, 1H) 3.86 (s, 3H) 3.64 (br d, J=12.01 Hz, 2H) 3.25 (br t, J=12.07 Hz, 2H) 2.37 (br d, J=12.26 Hz, 2H) 2.22 (q, J=11.34 Hz, 2H).

### Example 58: Synthesis of Compound 124

### Synthesis of Intermediate C100

[chemical structure]

[0357] To a solution of NaOH (58.7 g, 1.47 mol, 4.00 eq) in H₂O (1.40 L) was added 1H-pyrazole (25.0 g, 367 mmol, 1.00 eq) at 0° C. Then, Br₂ (176 g, 1.10 mol, 56.7 mL, 3.00 eq) was added to above mixture dropwise at 0° C. for 2 hrs. The reaction mixture was stirred at 25° C. for 1 hr. The reaction mixture was filtered and the filter cake was concentrated in vacuum to get solid. The solid was washed with H₂O (1000 mL) and dried in vacuum to afford a solid. The solid was triturated with acetonitrile (250 mL) and then filtered. The filter cake was concentrated in vacuum to give 3,4,5-tribromo-1H-pyrazole (50.0 g, 37.9%) as a solid. LCMS: (ESI, m/z): 306.8 [M+H]⁺.

### Synthesis of Intermediate C101

[chemical structure]

[0358] To a solution of 3,4,5-tribromo-1H-pyrazole (33.0 g, 108 mmol, 1.00 eq) and K₂CO₃ (44.9 g, 324 mmol, 3.00 eq) in acetone (428 mL) was added 1-chloropropan-2-one (10.9 g, 118 mmol, 1.10 eq). The reaction mixture was stirred at 25° C. for 2 hrs. The reaction mixture was diluted with water (200 mL), extracted with dichloromethane (3×200 mL), dried over Na₂SO₄, filtered and concentrated under reduced pressure to give an oil. The oil was triturated with methyl tertiary butyl ether (20.0 mL) at 25° C. for 40 mins and filtered. The filter cake was dried over in vacuum to give 1-(3,4,5-tribromopyrazol-1-yl)propan-2-one (22.0 g, 55.2%) as a solid. LCMS: (ESI, m/z): 362.8 [M+H]⁺. ¹H NMR (400 MHz, CHLOROFORM-d) δ ppm 4.98 (s, 2H) 2.20 (s, 3H).

### Synthesis of Intermediate C102

[chemical structure]

[0359] To a solution of 1-(3,4,5-tribromopyrazol-1-yl)propan-2-one (5.00 g, 13.8 mmol, 1.00 eq), tributyl(1-ethoxyvinyl)tin (5.50 g, 15.2 mmol, 5.14 mL, 1.10 eq) and bis(triphenylphosphine) palladium(ii) dichloride (486 mg, 692 umol, 0.050 eq) in dioxane (50.0 mL). The reaction mixture was stirred at 100° C. for 12 hrs. The reaction mixture was diluted with water (100 mL). The resulting mixture was extracted with ethyl acetate (2×100 mL). The combined organic layers were washed with brine (2×200 mL), dried over anhydrous Na₂SO₄. After filtration, the filtrate was concentrated under reduced pressure to give residue. The residue was diluted with tetrahydrofuran (24.0 mL) and 1 NH₄Cl (65.8 mL). The reaction mixture was stirred at 60° C. for 1 hr. The reaction mixture was diluted with water (300 mL), extracted with ethyl acetate (3×250 mL), washed with brine (4×300 mL), dried over Na₂SO₄, filtered and concentrated under reduced pressure to give oil. The oil was purified by column chromatography on silica gel eluted with petroleum ether/ethyl acetate (1/0 to 5/1) to give 1-(5-acetyl-3,4-dibromo-pyrazol-1-yl)propan-2-one (1.40 g, 16.5%) as a solid. LCMS: (ESI, m/z): 324.9 [M+H]⁺. ¹H NMR (400 MHz, CHLOROFORM-d) δ ppm 5.30 (s, 2H) 2.71 (s, 3H) 2.25 (s, 3H).

### Synthesis of C103

[chemical structure]

[0360] To a solution of 1-(5-acetyl-3,4-dibromo-pyrazol-1-yl)propan-2-one (0.700 g, 2.16 mmol, 1.00 eq) in acetic acid (2.90 mL) was added ammonium acetate (1.67 g, 21.6 mmol, 10.0 eq). The reaction mixture was stirred at 120° C. for 0.5 hr. The reaction mixture was diluted with water (20.0 mL), extracted with ethyl acetate (3×20.0 mL), washed with brine (4×50.0 mL), dried over Na₂SO₄, filtered and concentrated under reduced pressure to give an oil. The oil was purified by reversed-phase HPLC (column: C18 (250*50 mm*10 um), mobile phase: [water (NH₄HCO₃)-acetonitrile]; B %: 40%-80%, 10 min) to yield 2,3-dibromo-4,6-dimethyl-pyrazolo [1,5-a]pyrazine (300 mg, 16.9%) as a solid. LCMS: (ESI, m/z): 305.9 [M+H]⁺. ¹H NMR (400 MHz, DMSO-d6) δ ppm 8.53 (s, 1H) 2.85 (s, 3H) 2.39 (s, 3H).

### Synthesis of Intermediate C104

[chemical structure]

[0361] To a solution of 2,3-dibromo-4,6-dimethyl-pyrazolo[1,5-a]pyrazine (300 mg, 327 umol, 1.00 eq) in tetrahydrofuran (2.94 mL) was added isopropylmagnesium chloride (2.00 M, 655 μL, 4.00 eq) at 0° C. The reaction mixture was stirred at 0° C. for 0.5 hr. The reaction mixture was quenched by additional of methanol (20.0 mL). The reaction mixture was diluted with water (50.0 mL), extracted with ethyl acetate (3×40.0 mL), washed with brine (2×120 mL), dried over Na₂SO₄, filtered and concentrated under reduced pressure to give an oil. The oil was purified by column chromatography on silica gel eluted with petroleum ether/ethyl acetate (1/0 to 5/1) to give 2-bromo-4,6-dimethyl-pyrazolo[1,5-a]pyrazine (100 mg, 44.2%) as a solid. LCMS: (ESI, m/z): 225.8 [M+H]⁺. ¹H NMR (400 MHz, METHANOL-d₄) δ ppm 8.24 (s, 1H) 6.99 (s, 1H) 2.69 (s, 3H) 2.46 (d, J=0.63 Hz, 3H).

### Synthesis of Intermediate C105

[chemical structure]

[0362] To a solution of 2-bromo-4,6-dimethyl-pyrazolo[1,5-a]pyrazine (40.0 mg, 176 umol, 1.00 eq) and tert-butyl 4-[7-fluoro-5-(4,4,5,5-tetramethyl-1,3,2-dioxaborolan-2-yl)indazol-2-yl]piperidine-1-carboxylate (118 mg, 265 umol, 1.50 eq) in dioxane (0.320 mL) was added a solution of K₂CO₃ (48.9 mg, 353 umol, 2.00 eq) in H₂O (0.080 mL) and 1,1 [symbol] bis(diphenylphosphino)ferrocenedichloro palladium(II) (12.9 mg, 17.6 umol, 0.100 eq) successively. The reaction was stirred at 80° C. for 1 hr. The reaction mixture was diluted with water (10.0 mL), extracted with ethyl acetate (3×10.0 mL), dried over Na₂SO₄, filtered and concentrated under reduced pressure to give oil. The oil was purified by column chromatography on silica gel eluted with ethyl acetate/ethanol (1/0 to 5/1) to give product tert-butyl 4-[5-(4,6-dimethylpyrazolo[1,5-a]pyrazin-2-yl)-7-fluoro-indazol-2-yl]piperidine-1-carboxylate (40.0 mg, 20.9%) as a solid. LCMS: (ESI, m/z): 465.3 [M+H]⁺. ¹H NMR (400 MHz, METHANOL-d₄) 6=8.49 (d, J=2.8 Hz, 1H), 8.28 (s, 1H), 8.16 (d, J=0.8 Hz, 1H), 7.66 (dd, J=0.9, 12.8 Hz, 1H), 7.30 (s, 1H), 4.73 (tt, J=4.1, 11.4 Hz, 1H), 4.35-4.26 (m, 2H), 3.04 (br d, J=1.3 Hz, 2H), 2.76 (s, 3H), 2.48 (s, 3H), 2.28-2.21 (m, 2H), 2.19-2.07 (m, 2H), 1.51 (s, 9H).

### Synthesis of Compound 124

[chemical structure]

[0363] To a solution of tert-butyl 4-[5-(4,6-dimethylpyrazolo[1,5-a]pyrazin-2-yl)-7-fluoro-indazol-2-yl]piperidine-1-carboxylate (30.0 mg, 64.5 umol, 1.00 eq) in ethyl acetate (0.500 mL) was added HCl/ethyl acetate (2.00 M, 807 μL, 25.0 eq). The reaction mixture was stirred at 25° C. for 1 hr. The reaction mixture was filtered and the filter cake was purified by prep-HPLC (column: Phenomenex Luna 80*30 mm*3 um; mobile phase: [water (HCl)-acetonitrile]; B %: 1%-45%, 8 min) to give 2-[7-fluoro-2-(4-piperidyl) indazol-5-yl]-4,6-dimethyl-pyrazolo[1,5-a]pyrazine (22.7 mg, 92.7%) as a solid. LCMS: (ESI, m/z): 365.1 [M+H]⁺. ¹H NMR (400 MHz, D₂O) δ=8.39 (br s, 1H), 7.88 (br s, 1H), 7.58 (s, 1H), 7.05 (s, 1H), 6.96 (br d, J=12.4 Hz, 1H), 4.88 (br s, 1H), 3.69 (br d, J=12.6 Hz, 2H), 3.30 (br t, J=12.8 Hz, 2H), 2.56-2.45 (m, 5H), 2.44-2.31 (m, 2H), 2.09 (s, 3H).

### Example 59: Synthesis of Compound 149

[chemical structure]

[0364] To a solution of 6-[7-fluoro-2-(4-piperidyl)indazol-5-yl]-2,8-dimethyl-imidazo[1,2-b]pyridazine (100 mg, 274 umol, 1 eq) in DCM (1.00 mL) was added AcOH (24.7 mg, 411 umol, 23.5 uL, 1.5 eq), cyclopropanecarbaldehyde (28.8 mg, 411 umol, 30.7 uL, 1.5 eq) and sodium;triacetoxyboranuide (116 mg, 548 umol, 2 eq) under N₂ atmosphere. The mixture was stirred at 25° C. for 2 hrs. TLC (ethyl acetate, Rf=0.55) showed the starting material was consumed and a new major spot was generated. The reaction mixture was quenched by addition of aq NaHCO₃ (10.0 mL) at 0° C., and then extracted with ethyl acetate (3×10.0 mL). The combined organic layers were washed with brine (10.0 mL), dried over Na₂SO₄, filtered and concentrated under reduced pressure to give a residue. The residue was purified by column chromatography (SiO₂, petroleum ether/ethyl acetate=5/1 to 10/1) to give 6-[2-[1-(cyclopropylmethyl)-4-piperidyl]-7-fluoro-indazol-5-yl]-2,8-dimethyl-imidazo[1,2-b]pyridazine (43.9 mg, 38.2%) as a solid. LCMS: (ESI, m/z): 419 [M+H]^{+ 1}H NMR (DMSO-d₆, 400 MHz) δ ppm 8.74 (d, 1H, J=2.8 Hz), 8.29 (s, 1H), 8.03 (s, 1H), 7.63 (d, 1H, J=18.8 Hz), 7.58 (s, 1H), 4.5-4.6 (m, 1H), 3.1-3.2 (m, 2H), 2.60 (s, 3H), 2.40 (s, 3H), 2.10-2.29 (m, 8H), 0.81-1.06 (m, 1H), 0.41-0.62 (m, 2H), 0.10 (q, 2H, J=4.8 Hz). ¹⁹F NMR (DMSO-d₆, 376 MHz) δ ppm −130.567 (s, 1F).

### Example 60: Synthesis of Compound 140

### Synthesis of Intermediate C106

[chemical structure]

[0365] A mixture of 6-chloro-2-methyl-pyridin-3-amine (25.0 g, 175 mmol, 1.00 eq) and acetic acid (21.0 g, 349 mmol, 20.0 mL, 2.00 eq) in methanol (250 mL) was added Br₂ (50.4 g, 316 mmol, 1.80 eq) under N₂ protection at 0° C. The reaction mixture was stirred at 25° C. for 16 hrs. The reaction mixture was quenched by saturated aqueous Na₂S₂O₃ (500 mL) and saturated aqueous NaHCO₃ (500 mL), extracted with ethyl acetate (3×500 mL), washed with brine (600 mL), dried over with Na₂SO₄, filtered and concentrated under reduced pressure to give an oil. The oil was purified by chromatography on a silica gel eluted with ethyl acetate/petroleum ether=0/1 to 3/1 to give 4-bromo-6-chloro-2-methyl-pyridin-3-amine (16.0 g, 37.0%) as a solid. LCMS: (ESI, m/z): 220.9 [M+H]⁺. ¹H NMR (400 MHz, DMSO-d6) δ ppm 7.42 (s, 1H) 5.43 (br s, 2H) 2.33 (s, 3H)

### Synthesis of Intermediate C107

[chemical structure]

[0366] To a mixture of 4-bromo-6-chloro-2-methyl-pyridin-3-amine (14.0 g, 63.2 mmol, 1.00 eq), acetic acid (123 g, 2.05 mol, 32.5 eq) and isopentyl nitrite (11.1 g, 94.8 mmol, 12.8 mL, 1.50 eq) in toluene (350 mL) was added potassium acetate (12.4 g, 126 mmol, 2.00 eq) under N₂ protection at 0° C. The reaction mixture was stirred at 30° C. for 4 hrs. The mixture was concentrated under reduced pressure to remove solvent and saturated sodium bicarbonate solution (100 mL) was added to quench the reaction. The reaction mixture was extracted with ethyl acetate (3×200 mL), washed with brine (400 mL), dried over Na₂SO₄, filtered and the filtrate was concentrated under reduced pressure to give black solid. The black solid was purified by chromatography on a silica gel eluted with ethyl acetate/petroleum ether=0/1 to 1/2 to give 7-bromo-5-chloro-2H-pyrazolo[4,3-b]pyridine (4.50 g, 27.5%) as a solid. LCMS: (ESI, m/z): 231.9 [M+H]⁺. ¹H NMR (400 MHz, DMSO-d6) δ ppm 14.15 (br s, 1H) 8.41 (br s, 1H) 7.87 (br s, 1H)

### Synthesis of Intermediate C108

[chemical structure]

[0367] A mixture of 7-bromo-5-chloro-2H-pyrazolo[4,3-b]pyridine (3.00 g, 12.9 mmol, 1.00 eq) in N,N-dimethylformamide (60.0 mL) was added KI (7.50 g, 45.1 mmol, 3.50 eq), tert-butyl 4-bromopiperidine-1-carboxylate (11.9 g, 45.1 mmol, 3.50 eq) and Cs₂CO₃ (21.0 g, 64.5 mmol, 5.00 eq). The reaction mixture was stirred at 100° C. for 2 hrs. The reaction mixture was diluted with water (80.0 mL), extracted with ethyl acetate (3×80.0 mL), washed with brine (4×200 mL), dried over Na₂SO₄, filtered and concentrated under reduced pressure to give oil. The oil was purified by column chromatography on silica gel eluted with petroleum ether/ethyl acetate (1/0 to 5/1) to give tert-butyl 4-(7-bromo-5-chloro-pyrazolo[4,3-b]pyridin-2-yl)piperidine-1-carboxylate (1.51 g, 22.5%) as a solid. LCMS: (ESI, m/z): 415.1 [M+H]⁺.

### Synthesis of Intermediate C109

[chemical structure]

[0368] To a solution of tert-butyl 4-(7-bromo-5-chloro-pyrazolo[4,3-b]pyridin-2-yl) piperidine-1-carboxylate (235 mg, 565 umol, 1.00 eq) in tetrahydrofuran (3.00 mL) was added sodium methanolate (91.6 mg, 1.70 mmol, 3.00 eq). The reaction mixture was stirred at 60° C. for 3.5 hrs. The reaction mixture was concentrated in vacuum to give oil. The oil was purified by column chromatography on silica gel eluted with petroleum ether/ethyl acetate (5/1 to 0/1) to give tert-butyl 4-(5-chloro-7-methoxy-pyrazolo[4,3-b]pyridin-2-yl)piperidine-1-carboxylate (150 mg, 62.9%) as a solid. LCMS: (ESI, m/z): 367.2 [M+H]⁺. ¹H NMR (400 MHz, CHLOROFORM-d) δ ppm 8.05 (s, 1H) 6.56 (s, 1H) 4.56 (tt, J=11.56, 4.17 Hz, 1H) 4.23-4.44 (m, 2H) 4.09 (s, 3H) 2.92 (br t, J=10.91 Hz, 2H) 2.20-2.27 (m, 2H) 2.06-2.18 (m, 2H) 1.49 (s, 9H).

### Synthesis of Intermediate C110

[chemical structure]

[0369] To a mixture of tert-butyl 4-(5-chloro-7-methoxy-pyrazolo[4,3-b]pyridin-2-yl) piperidine-1-carboxylate (50.0 mg, 136 umol, 1.00 eq) and 6-(methoxymethoxy)-2-methyl-5-(4,4,5,5-tetramethyl-1,3,2-dioxaborolan-2-yl)indazole (65.0 mg, 204 umol, 1.50 eq) in dioxane (0.400 mL) was added a solution of K₂CO₃ (EVAL-0114-A8, 37.6 mg, 272 umol, 2.00 eq) in H₂O (0.100 mL). Then, 1,1 [symbol] bis(diphenylphosphino) ferrocenedichloro palladium(II) (9.97 mg, 13.6 umol, 0.100 eq) was added to the above mixture under N₂ protection. The reaction mixture was stirred at 60° C. for 1 hr. The reaction mixture was quenched by additional of H₂O (10.0 mL), extracted with ethyl acetate (3×10.0 mL), dried over Na₂SO₄, filtered and concentrated under reduced pressure to give yellow oil. The oil was purified by column chromatography on silica gel eluted with petroleum ether/ethyl acetate=10/1 to 1/1 to give tert-butyl 4-[7-methoxy-5-[6-(methoxymethoxy)-2-methyl-indazol-5-yl]pyrazolo[4,3-b]pyridin-2-yl]piperidine-1-carboxylate (55.0 mg, 38.6%) as a solid. LCMS: (ESI, m/z): 523.3 [M+H]⁺.

### Synthesis of Compound 140

[chemical structure]

[0370] To a solution of tert-butyl 4-[7-methoxy-5-[6-(methoxymethoxy)-2-methyl-indazol-5-yl]pyrazolo[4,3-b]pyridin-2-yl]piperidine-1-carboxylate (50.0 mg, 95.6 umol, 1.00 eq) in dioxane (1.00 mL) was added HCl/dioxane (4.00 M, 956 μL, 40.0 eq). The reaction mixture was stirred at 30° C. for 1 hr. The reaction mixture was filtered and the filter cake was purified by prep-HPLC (column: Phenomenex Luna 80*30 mm*3 um; mobile phase: [water (HCl)-acetonitrile]; B %: 1%-30%, 8 min) to give 5-[7-methoxy-2-(4-piperidyl)pyrazolo[4,3-b]pyridin-5-yl]-2-methyl-indazol-6-ol (14.0 mg, 37.5%) as a solid. LCMS: (ESI, m/z): 379.1 [M+H]⁺. ¹H NMR (400 MHz, D₂O) 6=8.56 (s, 1H), 8.19 (s, 1H), 8.05 (s, 1H), 7.12 (s, 1H), 6.84 (s, 1H), 4.98 (br t, J=11.3 Hz, 1H), 4.22 (s, 3H), 4.06 (s, 3H), 3.68 (br d, J=13.2 Hz, 2H), 3.30 (br t, J=12.4 Hz, 2H), 2.58-2.48 (m, 2H), 2.46-2.34 (m, 2H).

### Example 61: Synthesis of Compound 150

[chemical structure]

[0371] To a solution of 6-[7-fluoro-2-(4-piperidyl)indazol-5-yl]-2,8-dimethyl-imidazo[1,2-b]pyridazine (100 mg, 274 umol, 1 eq) in MeOH (1.00 mL) was added formaldehyde (66.8 mg, 823 umol, 61.2 uL, 37 wt %, 3 eq), AcOH (49.4 mg, 823 umol, 47.0 uL, 3 eq) and sodium;triacetoxyboranuide (116 mg, 548 umol, 2 eq) under N₂ atmosphere. The mixture was stirred at 25° C. for 2 hrs. TLC (ethyl acetate, Rf=0.55) showed the starting material was consumed and a new major spot was generated. The reaction mixture was quenched by addition of aq NaHCO₃ (10.0 mL) at 0° C., and then diluted with ethyl acetate (10.0 mL) and extracted with ethyl acetate (3×10.0 mL). The combined organic layers were washed with brine (10.0 mL), dried over Na₂SO₄, filtered and concentrated under reduced pressure to give a residue. The residue was purified by column chromatography (SiO₂, petroleum ether/ethyl acetate=5/1 to 10/1) to give 6-[7-fluoro-2-(1-methyl-4-piperidyl)indazol-5-yl]-2,8-dimethyl-imidazo[1,2-b]pyridazine (42.1 mg, 40.6%) as a solid. LCMS: (ESI, m/z): 379.3 [M+H]^{+ 1}H NMR (METHANOL-d₄, 400 MHz) δ ppm 8.53 (d, 1H, J=2.7 Hz), 8.20 (d, 1H, J=1.2 Hz), 7.89 (s, 1H), 7.75 (dd, 1H, J=1.2, 13.1 Hz), 7.63 (d, 1H, J=1.0 Hz), 4.4-4.7 (m, 1H), 3.0-3.1 (m, 2H), 2.66 (d, 3H, J=1.0 Hz), 2.48 (s, 3H), 2.38 (s, 3H), 2.2-2.4 (m, 6H) ¹⁹F NMR (METHANOL-d₄, 376 MHz) δ ppm −130.586 (s, 1F)

### Example 62: Synthesis of Compound 151

[chemical structure]

[0372] To a solution of 6-[7-fluoro-2-(4-piperidyl)indazol-5-yl]-2,8-dimethyl-imidazo[1,2-b]pyridazine (100 mg, 274 umol, 1 eq) in DCM (1.00 mL) was added N,N-diethylethanamine (27.7 mg, 274 umol, 38.1 uL, 1 eq), AcOH (32.9 mg, 548 umol, 31.3 uL, 2 eq), cyclobutanone (38.4 mg, 548 umol, 41.0 uL, 2 eq) and sodium;triacetoxyboranuide (116 mg, 548 umol, 2 eq) under N₂ atmosphere. The mixture was stirred at 25° C. for 2 hrs. TLC (ethyl acetate, Rf=0.55) showed the starting material was consumed and a new major spot was generated. The reaction mixture was quenched by addition of H₂O (10.0 mL) at 0° C., and then extracted with ethyl acetate (3×10.0 mL). The combined organic layers were washed with brine (10.0 mL), dried over Na₂SO₄, filtered and concentrated under reduced pressure to give a residue. The residue was purified by column chromatography (SiO₂, petroleum ether/ethyl acetate=5/1 to 10/1) to give 6-[2-(1-cyclobutyl-4-piperidyl)-7-fluoro-indazol-5-yl]-2, 8-dimethyl-imidazo [1,2-b] pyridazine (65.7 mg, 57.2%) as a solid. LCMS: (ESI, m/z): 419 [M+H]^{+ 1}H NMR (METHANOL-d₄, 400 MHz) δ ppm 8.51 (d, 1H, J=2.7 Hz), 8.19 (d, 1H, J=1.2 Hz), 7.89 (d, 1H, J=0.7 Hz), 7.74 (dd, 1H, J=1.3, 13.1 Hz), 7.62 (d, 1H, J=1.0 Hz), 4.51-4.64 (m, 1H), 3.09 (br d, 2H, J=12.0 Hz), 2.89 (quin, 1H, J=8.0 Hz), 2.66 (d, 3H, J=1.0 Hz), 2.48 (d, 3H, J=0.6 Hz), 2.15-2.38 (m, 8H), 1.92-2.05 (m, 2H), 1.74-1.86 (m, 2H), ¹⁹F NMR (METHANOL-d₄, 376 MHz) δ ppm −130.583 (s, 1F).

### Example 63: Synthesis of Compound 152

[chemical structure]

[0373] To a solution of 6-[7-fluoro-2-(4-piperidyl) indazol-5-yl]-2,8-dimethyl-imidazo[1,2-b]pyridazine (100 mg, 274 umol, 1 eq) in MeCN (1.00 mL) was added K₂CO₃ (113 mg, 823 umol, 3 eq) and 2-fluoroethyl 4-methylbenzenesulfonate (59.8 mg, 274 umol, 1 eq) under N₂ atmosphere. The mixture was stirred at 100° C. for 2 hrs. TLC (ethyl acetate, Rf=0.55) showed the starting material was consumed and a new major spot was generated. The reaction mixture was quenched by addition of H₂O (10.0 mL) at 0° C., and then extracted with ethyl acetate (3×10.0 mL). The combined organic layers were washed with brine (10.0 mL), dried over Na₂SO₄, filtered and the filtrate was concentrated under reduced pressure to give a residue. The residue was purified by column chromatography (SiO₂, petroleum ether/ethyl acetate=5/1 to 10/1) to give 6-[7-fluoro-2-[1-(2-fluoroethyl)-4-piperidyl]indazol-5-yl]-2,8-dimethyl-imidazo[1,2-b]pyridazine (25.2 mg, 22.3%) as a solid. LCMS: (ESI, m/z): 411.2 [M+H]^{+ 1}H NMR (METHANOL-d₄, 400 MHz) δ ppm 8.55 (d, 1H, J=2.7 Hz), 8.23 (d, 1H, J=1.2 Hz), 7.92 (d, 1H, J=0.7 Hz), 7.78 (dd, 1H, J=1.3, 13.1 Hz), 7.66 (d, 1H, J=1.0 Hz), 4.72-4.77 (m, 1H), 4.51-4.66 (m, 2H), 3.22 (br d, 2H, J=12.1 Hz), 2.81-2.96 (m, 1H), 2.78-2.80 (m, 1H), 2.50 (d, 3H, J=0.6 Hz), 2.40-2.52 (m, 2H), 2.31-2.45 (m, 4H) ¹⁹F NMR (METHANOL-d₄, 376 MHz) δ ppm −130.610 (s, 1F), −220.033 (s, 1F).

### Example 64: Synthesis of Compound 153

[chemical structure]

[0374] To a solution of tert-butyl 4-[7-benzyloxy-5-(2,8-dimethylimidazo[1,2-b]pyridazin-6-yl)pyrazolo [3,4-c]pyridin-2-yl]piperidine-1-carboxylate (110 mg, 199 umol, 1.00 eq) in dichloromethane (2.20 mL) was added tert-butyldimethylsilyltrifluoromethanesulfonate (105 mg, 397 umol, 2.00 eq) at 0° C. The reaction mixture was stirred at 25° C. for 2 hrs. LCMS showed the reaction was completed. The mixture was quenched with saturated sodium bicarbonate solution (1.00 mL) and water (2.00 mL). Then the reaction mixture was extracted with dichloromethane (3×2.00 mL), washed with brine (3.00 mL), dried over Na₂SO₄, filtered and the filtrate was concentrated under reduced pressure to give the white solid. The white solid was purified by prep-HPLC (Column: Waters Xbridge BEH C18 100×30 mm×10 um; mobile phase: [water (NH₄HCO₃)-acetonitrile]; B %: 35%-65%, 8 min) to give 6-[7-benzyloxy-2-(4-piperidyl)pyrazolo [3,4-c]pyridin-5-yl]-2,8-dimethyl-imidazo[1,2-b]pyridazine (7.14 mg, 7.92%) as a solid. LCMS: (ESI, m/z): 454.3 [M+H]⁺. ¹H NMR (400 MHz, DMSO-d6) δ ppm 8.61 (s, 1H) 8.15 (s, 1H) 8.02 (s, 1H) 7.91 (d, J=0.98 Hz, 1H) 7.61 (d, J=7.09 Hz, 2H) 7.34-7.47 (m, 3H) 5.70 (s, 2H) 4.45-4.81 (m, 1H) 3.09 (br d, J=12.59 Hz, 2H) 2.59-2.68 (m, 6H) 2.41 (s, 3H) 1.89-2.12 (m, 4H)

### Example 65: Synthesis of Compound 160

[chemical structure]

[0375] To a solution of 6-[7-fluoro-2-(4-piperidyl)indazol-5-yl]-2,8-dimethyl-imidazo[1,2-b]pyridazine (100 mg, 274 umol, 1 eq) in DMF (1.00 mL) was added 2-bromoethanol (34.2 mg, 274 umol, 19.4 uL, 1 eq) and TEA (138 mg, 1.37 mmol, 190 μL, 5 eq) under N₂ atmosphere. The mixture was stirred at 50° C. for 2 hrs. TLC (ethyl acetate, Rf=0.55) showed the starting material was consumed and a new major spot was generated. The reaction mixture was quenched by addition of water (10.0 mL) at 0° C., and then extracted with ethyl acetate (3×10.0 mL). The combined organic layers were washed with brine (10.0 mL), dried over Na₂SO₄, filtered and concentrated under reduced pressure to give a residue. The residue was purified by column chromatography (SiO₂, petroleum ether/ethyl acetate=5/1 to 10/1) to give 2-[4-[5-(2,8-dimethylimidazo[1,2-b]pyridazin-6-yl)-7-fluoro-indazol-2-yl]-1-piperidyl]ethanol (31.0 mg, 26.8%) as a solid. LCMS: (ESI, m/z): 409 [M+H]^{+ 1}H NMR (DMSO-d₆, 400 MHz) δ ppm 8.73 (d, 1H, J=2.7 Hz), 8.28 (s, 1H), 8.03 (s, 1H), 7.7-7.8 (m, 2H), 4.5-4.6 (m, 1H), 4.43 (br t, 1H, J=5.0 Hz), 3.54 (q, 2H, J=6.1 Hz), 3.04 (br d, 2H, J=9.0 Hz), 2.59 (s, 3H), 2.4-2.5 (m, 2H), 2.40 (s, 3H), 2.1-2.2 (m, 6H). ¹⁹F NMR (DMSO-d₆, 376 MHz) δ ppm −128.364 (s, 1F).

### Example 66: Synthesis of Compound 166

### Synthesis of Intermediate C113

[chemical structure]

[0376] To a solution of 6-(7-fluoro-2H-indazol-5-yl)-2,8-dimethyl-imidazo[1,2-b]pyridazine (600 mg, 2.13 mmol, 1 eq) and tert-butyl 3-fluoro-4-methylsulfonyloxy-piperidine-1-carboxylate (C7, 1.90 g, 6.40 mmol, 3 eq) in DMF (1.00 mL) was added KI (1.06 g, 6.40 mmol, 3 eq) and Cs₂CO₃ (3.47 g, 10.6 mmol, 5 eq) under N₂ atmosphere. The mixture was stirred at 100° C. for 12 hrs. TLC (ethyl acetate, Rf=0.4, 0.6) showed the starting material was consumed and a new major spot was generated. The reaction mixture was cooled to 25° C., quenched by addition of water (40.0 mL) at 25° C., and then extracted with ethyl acetate (3×50.0 mL). The combined organic layers were dried over MgSO₄, filtered and concentrated under reduced pressure to give a residue, which was purified by silica gel column chromatography (petroleum ether/ethyl acetate=1:1) to give tert-butyl 4-[5-(2,8-dimethylimidazo[1,2-b]pyridazin-6-yl)-7-fluoro-indazol-2-yl]-3-fluoro-piperidine-1-carboxylate (150 mg, 14.5%) as a solid. LCMS: (ESI, m/z): 483.3 [M+H]^{+ 1}H NMR (CHLOROFORM-d, 400 MHz) δ ppm 8.18 (d, 1H, J=2.4 Hz), 8.01 (d, 1H, J=1.2 Hz), 7.77 (s, 1H), 7.70 (dd, 1H, J=1.2, 12.6 Hz), 7.3-7.3 (m, 1H), 4.9-5.2 (m, 1H), 4.60 (br s, 1H), 4.5-4.6 (m, 1H), 4.2-4.5 (m, 1H), 2.8-3.1 (m, 2H), 2.7-2.8 (m, 3H), 2.5-2.6 (m, 4H), 2.2-2.3 (m, 1H), 1.51 (s, 9H) ¹⁹F NMR (CHLOROFORM-d, 376 MHz) δ ppm −127.476 (s, 1F)

### Synthesis of Compound 166

[chemical structure]

[0377] To a solution of tert-butyl 4-[5-(2,8-dimethylimidazo[1,2-b]pyridazin-6-yl)-7-fluoro-indazol-2-yl]-3-fluoro-piperidine-1-carboxylate (20.0 mg, 41.4 umol, 1 eq) in EtOAc (2.00 mL) was added HCl/EtOAc (4 M, 10.3 uL, 1 eq) under N₂ atmosphere. The mixture was stirred at 25° C. for 2 hrs. TLC (ethyl acetate, Rf=0.1) showed the starting material was consumed and a new major spot was generated. The reaction mixture was concentrated under reduced pressure to remove ethyl acetate. The crude product was purified by re-crystallization from MeOH (10.0 mL) at 25° C. to give 6-[7-fluoro-2-(3-fluoro-4-piperidyl) indazol-5-yl]-2, 8-dimethyl-imidazo [1, 2-b]pyridazine (4.54 mg, 27.3%) as a solid. LCMS: (ESI, m/z): 383.3 [M+H]^{+ 1}H NMR (METHANOL-d₄, 400 MHz) δ ppm 8.71 (d, 1H, J=2.6 Hz), 8.45 (d, 1H, J=1.3 Hz), 8.3-8.3 (m, 2H), 7.87 (dd, 1H, J=1.3, 12.9 Hz), 5.3-5.5 (m, 1H), 5.2-5.3 (m, 1H), 3.9-4.0 (m, 1H), 3.7-3.8 (m, 1H), 3.47 (td, 1H, J=8.3, 13.1 Hz), 3.36 (td, 1H, J=4.4, 9.1 Hz), 2.78 (d, 3H, J=1.0 Hz), 2.65 (d, 3H, J=0.8 Hz), 2.61 (br dd, 2H, J=4.2, 9.1 Hz) ¹⁹F NMR (METHANOL-d₄, 376 MHz) δ ppm −129.453 (s, 1F), −190.237 (s, 1F)

### Example 67: Synthesis of Compound 189

### Synthesis of Intermediate C114

[chemical structure]

[0378] A mixture of 6-(7-fluoro-2H-indazol-5-yl)-2,8-dimethyl-imidazo[1,2-b]pyridazine (100 mg, 355 umol, 1.00 eq), tert-butyl 8-(p-tolylsulfonyloxy)-5-azaspiro[3.5]nonane-5-carboxylate (154 mg, 391 umol, 1.10 eq) and Cs₂CO₃ (347 mg, 1.07 mmol, 3.00 eq) in N,N-dimethylformamide (2.00 mL) was stirred at 80° C. for 12 hrs. LCMS showed the reaction was completed. The reaction mixture was diluted with ethyl acetate (3.00 mL), washed with water (3.00 mL×3). The organic layer was dried over Na₂SO₄, filtered and concentrated under reduced pressure to give crude product. The crude product was purified by column chromatography (SiO₂, petroleum ether/ethyl acetate=1/0 to 1/1) to give tert-butyl 8-[5-(2,8-dimethylimidazo[1,2-b]pyridazin-6-yl)-7-fluoro-indazol-2-yl]-5-azaspiro[3.5]nonane-5-carboxylate (35.0 mg, 6.50%) as an oil. LCMS: (ESI, m/z): 505.4 [M+H]⁺. ¹H NMR (400 MHz, CHLOROFORM-d) δ ppm 8.11 (d, J=2.51 Hz, 1H) 7.99 (d, J=1.00 Hz, 1H) 7.77 (s, 1H) 7.68 (dd, J=12.55, 1.13 Hz, 1H) 7.30 (s, 1H) 4.84-4.95 (m, 1H) 4.06-4.14 (m, 1H) 2.82-2.90 (m, 1H) 2.74-2.81 (m, 1H) 2.73 (s, 3H) 2.64 (dd, J=12.30, 3.51 Hz, 1H) 2.50-2.57 (m, 3H) 2.04-2.29 (m, 5H) 1.87-2.00 (m, 1H) 1.73-1.85 (m, 2H) 1.50 (s, 9H)

### Synthesis of Compound 189

[chemical structure]

[0379] To a solution of tert-butyl 8-[5-(2,8-dimethylimidazo[1,2-b]pyridazin-6-yl)-7-fluoro-indazol-2-yl]-5-azaspiro[3.5]nonane-5-carboxylate (30.0 mg, 59.4 umol, 1.00 eq) in 1,4-dioxane (0.500 mL) was added HCl/dioxane (4.00 M, 0.500 mL, 33.6 eq). The reaction mixture was stirred at 25° C. for 0.5 hrs. LCMS showed the reaction was completed. The reaction mixture was concentrated under reduced pressure to give a residue. The residue was purified by prep-HPLC (column: Waters Xbridge BEH C18 100*30 mm*10 um; mobile phase: [water (HCl)-acetonitrile]; B %: 1%-30%, 8 min) to give 6-[2-(5-azaspiro[3.5]nonan-8-yl)-7-fluoro-indazol-5-yl]-2,8-dimethyl-imidazo[1,2-b]pyridazine (18.9 mg, 78.9%) as a solid. LCMS: (ESI, m/z): 405.2 [M+H]⁺. ¹H NMR (400 MHz, METHANOL-d4) δ ppm 8.70 (d, J=2.63 Hz, 1H) 8.44 (d, J=1.25 Hz, 1H) 8.30 (dd, J=7.03, 1.00 Hz, 2H) 7.85 (dd, J=12.80, 1.25 Hz, 1H) 4.96-5.05 (m, 1H) 3.54 (dt, J=13.05, 3.45 Hz, 1H) 3.21-3.29 (m, 1H) 2.73-2.84 (m, 4H) 2.65 (d, J=0.88 Hz, 3H) 2.38-2.54 (m, 6H) 2.16-2.25 (m, 1H) 2.04-2.14 (m, 2H)

### Example 68: Synthesis of Compound 208

### Synthesis of Intermediate C116

[chemical structure]

[0380] To a mixture of tert-butyl 7-oxo-4-azaspiro[2.5]octane-4-carboxylate (5.00 g, 22.1 mmol, 1.00 eq) in ethanol (50.0 mL) was added NaBH₄ (1.50 g, 39.7 mmol, 1.79 eq) at 0° C. under N₂ protection. The reaction mixture was stirred at 25° C. for 2 hrs. The reaction was quenched with water (150 mL) slowly and extracted with dichloromethane (3×150 mL). The combined organic phases were washed with brine (150 mL), dried over anhydrous Na₂SO₄, filtered and concentrated in vacuo to give tert-butyl 7-hydroxy-4-azaspiro[2.5]octane-4-carboxylate (5.00 g, 89.2%) as an oil. The oil was used to next step without further purification. LCMS: (ESI, m/z): 172.3 [M−55]⁺. ¹H NMR (400 MHz, DMSO-d6) δ ppm 4.66 (d, J=4.88 Hz, 1H) 3.64-3.81 (m, 2H) 2.81 (br t, J=11.82 Hz, 1H) 1.70-1.79 (m, 1H) 1.55 (br t, J=11.07 Hz, 1H) 1.39 (s, 9H) 1.15-1.26 (m, 2H) 0.99 (dt, J=10.04, 6.24 Hz, 1H) 0.74 (dt, J=9.32, 6.28 Hz, 1H) 0.36-0.51 (m, 2H)

### Synthesis of Intermediate C117

[chemical structure]

[0381] To a solution of tert-butyl 7-hydroxy-4-azaspiro[2.5]octane-4-carboxylate (2.50 g, 11.0 mmol, 1.00 eq) and triethylamine (2.23 g, 22.0 mmol, 3.06 mL, 2.00 eq) in dichloromethane (50.0 mL) was added methanesulfonyl chloride (2.52 g, 22.0 mmol, 2.00 eq) at 0° C. under N₂ protection. The reaction mixture was stirred at 25° C. for 3 hrs. The reaction mixture was quenched with water (100 mL), extracted with ethyl acetate (3×100 mL), dried over Na₂SO₄, filtered and the filtrate was concentrated under reduced pressure to give tert-butyl 7-methylsulfonyloxy-4-azaspiro[2.5]octane-4-carboxylate (3.00 g, 71.4%) as an oil. The oil was used to next step without further purification. LCMS: (ESI, m/z): 250.2 [M−55]⁺. ¹H NMR (400 MHz, DMSO-d6) δ ppm 4.88 (tt, J=8.90, 4.49 Hz, 1H) 3.66-3.76 (m, 1H) 3.19 (s, 3H) 3.03-3.15 (m, 1H) 1.94-2.00 (m, 1H) 1.71-1.82 (m, 1H) 1.61-1.69 (m, 1H) 1.54 (dtd, J=13.26, 9.44, 9.44, 4.13 Hz, 1H) 1.41 (s, 9H) 0.92-1.04 (m, 1H) 0.74-0.86 (m, 1H) 0.55-0.68 (m, 2H)

### Synthesis of Intermediate C119

[chemical structure]

[0382] To a mixture of 6-chloro-2-methyl-pyridin-3-amine (5.00 g, 35.0 mmol, 1.00 eq), acetic acid (4.21 g, 70.1 mmol, 2.00 eq) in methanol (50.0 mL) was added Br₂ (10.0 g, 63.1 mmol, 1.80 eq) at 0° C. The reaction was stirred at 25° C. for 16 hrs. The reaction mixture was quenched with water (100 mL), extracted with ethyl acetate (3×100 mL), dried over Na₂SO₄, filtered and the filtrate was concentrated under reduced pressure to give residue. The residue was purified by column chromatography (petroleum ether/ethyl acetate=3/1) to give 4-bromo-6-chloro-2-methyl-pyridin-3-amine (6.00 g, 77.2%) as a solid. LCMS: (ESI, m/z): 223.2 [M+H]⁺. ¹H NMR (400 MHz, DMSO-d6) δ ppm 7.39 (s, 1H), 5.54-4.95 (m, 2H), 2.33 (s, 3H)

### Synthesis of C120

[chemical structure]

[0383] To a mixture of 4-bromo-6-chloro-2-methyl-pyridin-3-amine (3.00 g, 13.5 mmol, 1.00 eq), potassium acetate (2.66 g, 27.0 mmol, 2.00 eq), acetic acid (26.4 g, 440 mmol, 32.5 eq) in toluene (75.0 mL) was added isopentyl nitrite (2.38 g, 20.3 mmol, 1.50 eq) under nitrogen protection at 0° C. The reaction mixture was stirred at 30° C. for 4 hrs. The reaction mixture was quenched with water (100 mL), extracted with ethyl acetate (3×100 mL), dried over Na₂SO₄, filtered and the filtrate was concentrated under reduced pressure to give residue. The residue was purified by column chromatography (petroleum ether/ethyl acetate=3/1) to give 7-bromo-5-chloro-2H-pyrazolo[4,3-b]pyridine (2.00 g, 31.7%) as a solid. LCMS: (ESI, m/z): 233.9 [M+H]⁺. ¹H NMR (400 MHz, DMSO-d6) δ ppm 14.31-13.96 (m, 1H), 8.53-8.37 (m, 1H), 7.87 (s, 1H)

### Synthesis of Intermediate C121

[chemical structure]

[0384] To a solution of 7-bromo-5-chloro-2H-pyrazolo[4,3-b]pyridine (500 mg, 2.15 mmol, 1.0 eq) and tert-butyl 7-methylsulfonyloxy-4-azaspiro[2.5]octane-4-carboxylate (C3, 788 mg, 2.58 mmol, 1.20 eq) in N,N-dimethylformamide (5.00 mL) was added Cs₂CO₃ (1.40 g, 4.30 mmol, 2.0 eq). The reaction mixture was stirred at 100° C. for 2 hrs. The reaction mixture was diluted with H₂O (20.0 mL), extracted with ethyl acetate (3×20.0 mL), washed with brine (3×20.0 mL), dried over Na₂SO₄, filtered and concentrated under reduced pressure to give brown oil. The brown oil was purified by column chromatography on silica gel eluted with petroleum ether/ethyl acetate (1/0 to 15/1) to give tert-butyl 7-(7-bromo-5-chloro-pyrazolo[4,3-b]pyridin-2-yl)-4-azaspiro[2.5]octane-4-carboxylate (70.0 mg, 7%) as an oil. LCMS: (ESI, m/z): 441.1 [M+H]⁺. ¹H NMR (400 MHz, METHANOL-d4) δ ppm 8.60 (s, 1H) 7.63 (s, 1H) 4.94-5.04 (m, 1H) 4.16-4.24 (m, 1H) 3.10-3.22 (m, 1H) 2.54-2.63 (m, 1H) 2.09-2.26 (m, 2H) 1.58 (ddd, J=12.69, 4.25, 1.19 Hz, 1H) 1.52 (s, 9H) 1.30-1.36 (m, 1H) 0.97 (dt, J=9.63, 6.44 Hz, 1H) 0.64-0.79 (m, 2H)

### Synthesis of Intermediate C122

[chemical structure]

[0385] To a solution of tert-butyl 7-(7-bromo-5-chloro-pyrazolo[4,3-b]pyridin-2-yl)-4-azaspiro[2.5]octane-4-carboxylate (100 mg, 226 umol, 1.00 eq) and 2,4,6-trimethyl-1,3,5,2,4,6-trioxatriborinane (85.2 mg, 339 umol, 1.50 eq) in N,N-dimethylformamide (1.00 mL) was added K₂CO₃ (125 mg, 905 umol, 4.00 eq) and tetrakis(triphenylphosphine)palladium(0) (26.1 mg, 22.6 umol, 0.100 eq). The reaction mixture was stirred at 80° C. for 5 hrs. The reaction mixture was diluted with H₂O (5.00 mL), extracted with ethyl acetate (3×5.00 mL), washed with brine (3×5.00 mL), dried over Na₂SO₄, filtered and concentrated under reduced pressure to give an oil. The yellow oil was purified by column chromatography on silica gel eluted with petroleum ether/ethyl acetate (1/0 to 10/1) to give tert-butyl 7-(5-chloro-7-methyl-pyrazolo[4,3-b]pyridin-2-yl)-4-azaspiro[2.5]octane-4-carboxylate (60.0 mg, 56.2%) as a solid. LCMS: (ESI, m/z): 377.2 [M+H]⁺. ¹H NMR (400 MHz, METHANOL-d4) δ ppm 8.41 (s, 1H) 7.12 (d, J=1.00 Hz, 1H) 4.90-4.99 (m, 1H) 4.15-4.23 (m, 1H) 3.10-3.22 (m, 1H) 2.54-2.64 (m, 4H) 2.16-2.21 (m, 2H) 1.51 (s, 10H) 1.28-1.36 (m, 2H) 0.96 (dt, J=9.57, 6.54 Hz, 1H) 0.63-0.77 (m, 2H)

### Synthesis of Intermediate C123

[chemical structure]

[0386] To a solution of tert-butyl 7-(5-chloro-7-methyl-pyrazolo[4,3-b]pyridin-2-yl)-4-azaspiro[2.5]octane-4-carboxylate (40.0 mg, 106 umol, 1.00 eq) and 2,8-dimethyl-6-(4,4,5,5-tetramethyl-1,3,2-dioxaborolan-2-yl)imidazo[1,2-b]pyridazine (A2, 139 mg, 509 umol, 4.80 eq) in dioxane (1.92 mL) was added a solution of K₂CO₃ (39.6 mg, 286 umol, 2.70 eq) in H₂O (0.48 mL). Then, 1,1-bis(diphenylphosphino)ferrocene]dichloropalladium(II) (13.2 mg, 18.0 umol, 0.17 eq) was added to the above mixture under N₂ protection. The reaction mixture was stirred at 80° C. for 1 hr. The reaction mixture was diluted with H₂O (10.0 mL), extracted with ethyl acetate (3×20.0 mL), dried over Na₂SO₄, filtered and concentrated under reduced pressure to give an oil. The oil was purified by column chromatography on silica gel eluted with petroleum ether/ethyl acetate (1/0 to 5/1) to give tert-butyl 7-[5-(2,8-dimethylimidazo[1,2-b]pyridazin-6-yl)-7-methyl-pyrazolo[4,3-b]pyridin-2-yl]-4-azaspiro[2.5]octane-4-carboxylate (34.0 mg, 32%) as a solid. LCMS: (ESI, m/z): 488.4 [M+H]⁺.

### Synthesis of Compound 208

[chemical structure]

[0387] To a solution of tert-butyl 7-[5-(2,8-dimethylimidazo[1,2-b]pyridazin-6-yl)-7-methyl-pyrazolo [4,3-b]pyridin-2-yl]-4-azaspiro[2.5]octane-4-carboxylate (33.0 mg, 67.6 umol, 1.00 eq) in dioxane (1.00 mL) was added HCl/dioxane (7.0 M, 662 μL, 68.5 eq). The reaction mixture was stirred at 25° C. for 1 hr. LCMS showed the reaction mixture was completed. The reaction mixture was filtered and the filter cake was dried over in vacuum to afford a solid. The solid was purified by prep-HPLC (column: Phenomenex Luna 80*30 mm*3 um; mobile phase: [water (HCl)-acetonitrile]; B %: 1%-25%, 8 min) to afford 2-(4-azaspiro[2.5]octan-7-yl)-5-(2,8-dimethylimidazo[1,2-b]pyridazin-6-yl)-7-methyl-pyrazolo[4,3-b]pyridine (9.34 mg, 35.6%) as a solid. LCMS: (ESI, m/z): 388.3 [M+H]⁺. ¹HNMR (400 MHz, METHANOL-d4) δ ppm 8.72 (s, 2H) 8.35 (s, 1H) 8.22 (s, 1H) 5.09-5.18 (m, 1H) 3.70 (dt, J=12.91, 3.55 Hz, 1H) 3.41-3.49 (m, 1H) 2.91-3.00 (m, 1H) 2.80 (s, 3H) 2.74 (s, 3H) 2.67 (s, 3H) 2.56-2.64 (m, 2H) 2.00 (dd, J=13.88, 3.38 Hz, 1H) 1.06-1.21 (m, 3H) 0.97-1.05 (m, 1H)

### Example 69: Synthesis of Compound 211

### Synthesis of Intermediate C125

[chemical structure]

[0388] To a solution of 5,7-dichloro-2-[(4-methoxyphenyl)methyl]pyrazolo[4,3-d]pyrimidine (500 mg, 1.62 mmol, 1.00 eq) in tetrahydrofuran (5.00 mL) was added benzylalcohol (183 mg, 1.70 mmol, 176 μL, 1.05 eq) at 25° C. under N₂ atmosphere. The reaction mixture was cooled to −70° C. and then NaH (64.7 mg, 1.62 mmol, 60 wt %, 1.00 eq) was added in portions. The mixture was stirred at −70° C. for 30 min, then warmed up to −65° C. and stirred for 2 hrs. The reaction was quenched by addition of saturated NH₄Cl (20.0 mL) and extracted with ethyl acetate (20 mL×2). The combined organic layer was washed with saturated brine (20.0 mL), dried over Na₂SO₄, filtered and concentrated under reduced pressure to give 7-benzyloxy-5-chloro-2-[(4-methoxyphenyl)methyl]pyrazolo[4,3-d]pyrimidine (600 mg, 97.4%) as a solid. LCMS: (ESI, m/z): 381.1 [M+H]⁺. ¹H NMR (400 MHz, DMSO-d6) δ ppm 8.75 (s, 1H) 7.50-7.58 (m, 2H) 7.36-7.47 (m, 3H) 7.33 (d, J=8.63 Hz, 2H) 6.88-6.93 (m, 2H) 5.58 (s, 4H) 3.72 (s, 3H)

### Synthesis of Intermediate C126

[chemical structure]

[0389] To a solution of 7-benzyloxy-5-chloro-2-[(4-methoxyphenyl)methyl]pyrazolo[4,3-d]pyrimidine (600 mg, 1.58 mmol, 1.00 eq) and 2,8-dimethyl-6-(4,4,5,5-tetramethyl-1,3,2-dioxaborolan-2-yl)imidazo[1,2-b]pyridazine (860 mg, 3.15 mmol, 2.00 eq) in H₂O (1.25 mL) and 1,4-dioxane (5.00 mL) was added 1,1 [symbol] bis(diphenylphosphino)ferrocenedichloro palladium(II) (115 mg, 157 umol, 0.10 eq) and K₂CO₃ (653 mg, 4.73 mmol, 3.00 eq) under N₂ protection. The reaction mixture was stirred at 100° C. for 3 hrs. The reaction was diluted with ethyl acetate (10.0 mL) and washed with water (5.00 mL×2), dried over Na₂SO₄, filtered and concentrated under reduced pressure to give residue. The residue was purified by column chromatography (SiO₂, ethyl acetate/methanol=1/0 to 24/1) to give 7-benzyloxy-5-(2,8-dimethylimidazo[1,2-b]pyridazin-6-yl)-2-[(4-methoxyphenyl)methyl]pyrazolo [4,3-d]pyrimidine (300 mg, 38.7%) as a solid. LCMS: (ESI, m/z): 492.2 [M+H]⁺. ¹H NMR (400 MHz, DMSO-d₆) δ ppm 8.92 (s, 1H) 8.17 (s, 1H) 8.04 (s, 1H) 7.62-7.66 (m, 2H) 7.41-7.46 (m, 2H) 7.35-7.40 (m, 3H) 6.91-6.94 (m, 2H) 5.76 (s, 2H) 5.64 (s, 2H) 3.72 (s, 3H) 2.64 (d, J=0.88 Hz, 3H) 2.44 (s, 3H)

### Synthesis of Intermediate C127

[chemical structure]

[0390] The mixture of 7-benzyloxy-5-(2,8-dimethylimidazo[1,2-b]pyridazin-6-yl)-2-[(4-methoxyphenyl) methyl]pyrazolo[4,3-d]pyrimidine (300 mg, 610 umol, 1.00 eq) in trifluoroacetic acid (3.00 mL) was stirred at 80° C. for 40 min. The reaction mixture was concentrated under reduced pressure to give an oil. The oil was diluted with ethyl acetate (5.00 mL) and washed with saturated NaHCO₃ (10.0 mL). The aqueous phase was extracted with ethyl acetate (8.00 mL×3). The combined organic layer was dried over Na₂SO₄, filtered and concentrated under reduced pressure to give crude product. The crude product was triturated with methanol (1.00 mL) at 25° C. for 15 min to give 7-benzyloxy-5-(2,8-dimethylimidazo[1,2-b]pyridazin-6-yl)-2H-pyrazolo[4,3-d]pyrimidine (35-3, 200 mg, 88.2% yield) as a solid. LCMS: (ESI, m/z): 372.2 [M+H]⁺

### Synthesis of Intermediate C128

[chemical structure]

[0391] The suspension of 7-benzyloxy-5-(2,8-dimethylimidazo[1,2-b]pyridazin-6-yl)-2H-pyrazolo[4,3-d]pyrimidine (200 mg, 538 umol, 1.00 eq), tert-butyl 4-methylsulfonyloxypiperidine-1-carboxylate (300 mg, 1.08 mmol, 2.00 eq) and Cs₂CO₃ (526 mg, 1.62 mmol, 3.00 eq) in N,N-dimethylformamide (4.00 mL) was stirred at 100° C. for 8 hrs. The reaction mixture was diluted with ethyl acetate (20.0 mL) and washed with saturated brine (20.0 mL). The aqueous layer was extracted with ethyl acetate (10.0 mL×2). The organic layers were combined, dried over Na₂SO₄, filtered and concentrated under reduced pressure to give residue. The residue was purified by prep-HPLC (column: Waters Xbridge BEH C18 100×30 mm×10 um; mobile phase: [water (NH₄HCO₃)-acetonitrile]; B %: 40%-70%, 8 min) to give a mixture of tert-butyl 4-[7-benzyloxy-5-(2,8-dimethylimidazo[1,2-b]pyridazin-6-yl)pyrazolo[4,3-d]pyrimidin-2-yl]piperidine-1-carboxylate and tert-butyl 4-(7-(benzyloxy)-5-(2,8-dimethylimidazo[1,2-b]pyridazin-6-yl)-1H-pyrazolo[4,3-d]pyrimidin-1-yl)piperidine-1-carboxylate (63.0 mg, 21.0%) as a solid. N LCMS: (ESI, m/z): 555.5 [M+H]^{+ 1}H NMR (400 MHz, METHANOL-d4) δ ppm 8.28-8.67 (m, 1H) 8.06 (d, J=1.13 Hz, 1H) 7.98 (s, 1H) 7.21-7.44 (m, 3H) 7.10-7.16 (m, 2H) 5.75-5.97 (m, 3H) 3.38-3.54 (m, 4H) 2.70 (d, J=0.88 Hz, 3H) 2.49-2.54 (m, 3H) 2.02-2.19 (m, 2H) 1.78-2.01 (m, 2H) 1.48-1.51 (m, 9H)

### Synthesis of Intermediate C129

[chemical structure]

[0392] To the mixture of tert-butyl 4-[7-benzyloxy-5-(2,8-dimethylimidazo[1,2-b]pyridazin-6-yl)pyrazolo[4,3-d]pyrimidin-2-yl]piperidine-1-carboxylate and tert-butyl 4-(7-(benzyloxy)-5-(2,8-dimethylimidazo[1,2-b]pyridazin-6-yl)-1H-pyrazolo[4,3-d]pyrimidin-1-yl)piperidine-1-carboxylate (60.0 mg, 108 umol, 1.00 eq) in methanol (1.00 mL) was added NaOH (1.00 M, 1.00 mL, 9.24 eq) and the reaction mixture was stirred at 80° C. for 40 mins. The reaction mixture was poured into water (5.00 mL) and acidified to pH=7 with concentrated HCl. The resulting mixture was extracted with ethyl acetate (5.00 mL×10). The organic layer was combined, dried over Na₂SO₄, filtered and concentrated under reduced pressure to give the crude product of tert-butyl 4-[5-(2,8-dimethylimidazo[1,2-b]pyridazin-6-yl)-7-oxo-6H-pyrazolo[4,3-d]pyrimidin-2-yl]piperidine-1-carboxylate (40.0 mg, 79.6%) as a solid. The solid was used to the next step directly. LCMS: (ESI, m/z): 465.3 [M+H]⁺

### Synthesis of Compound 211

[chemical structure]

[0393] To the solution of tert-butyl 4-[5-(2,8-dimethylimidazo[1,2-b]pyridazin-6-yl)-7-oxo-6H-pyrazolo[4,3-d]pyrimidin-2-yl]piperidine-1-carboxylate (35-4, 40.0 mg, 86.1 umol, 1.00 eq) in 1,4-dioxane (0.100 mL) was added HCl/dioxane (4.00 M, 0.100 mL). The reaction was stirred at 25° C. for 2 hrs. LCMS showed the reaction was completed. The reaction mixture was concentrated under reduced pressure to give residue. The residue was purified by prep-HPLC (column: Phenomenex Luna 80×30 mm×3 um; mobile phase: [water (HCl)-acetonitrile]; B %: 1%-20%, 8 min) to give 5-(2,8-dimethylimidazo[1,2-b]pyridazin-6-yl)-2-(4-piperidyl)-6H-pyrazolo[4,3-d]pyrimidin-7-one (EVAL-0167-0035, 4.20 mg, 16.5%) as white solid. LCMS: (ESI, m/z): 365.3 [M+H]⁺. ¹H NMR (400 MHz, METHANOL-d4) δ ppm 8.48 (s, 1H) 8.43 (s, 1H) 8.32 (s, 1H) 4.92-4.95 (m, 1H) 3.64 (dt, J=13.07, 3.22 Hz, 2H) 3.22-3.30 (m, 2H) 2.78 (d, J=1.00 Hz, 3H) 2.64 (s, 3H) 2.39-2.50 (m, 4H)

### Example 70: Synthesis of Compound 213

### Synthesis of Intermediate C131

[chemical structure]

[0394] To a solution of tert-butyl piperazine-1-carboxylate (206 mg, 1.11 mmol, 1.20 eq) and 5-bromo-7-fluoro-2H-indazole (200 mg, 0.93 mmol, 1.00 eq) in tetrahydrofuran (2.00 mL) was added (2-dicyclohexylphosphino-2′,6′-diisopropoxy-1,1′-biphenyl) [2-(2′-amino-1,1′-biphenyl)]palladium(II)methanesulfonate (77.8 mg, 0.093 mmol, 0.100 eq) and lithium bis(trimethylsilyl)amide (1.00 M, 3.72 mL, 4.00 eq). The reaction mixture was stirred at 80° C. for 12 hrs under N₂ protection. The reaction mixture was quenched with saturated ammonium chloride solution (20.0 mL), extracted with ethyl acetate (3×10.0 mL), washed with brine (10.0 mL), dried over Na₂SO₄, filtered and the filtrate was concentrated under reduced pressure to give the crude product. The crude product was purified by silica flash column chromatography (petroleum ether/ethyl acetate=1/1) to give tert-butyl 4-(7-fluoro-2H-indazol-5-yl)piperazine-1-carboxylate (150 mg, 33.5%) as a solid. LCMS: (ESI, m/z): 321.1 [M+H]⁺. ¹H NMR (400 MHz, CHLOROFORM-d) 6=8.49-7.83 (m, 1H), 7.27 (s, 1H), 7.03-6.85 (m, 2H), 3.69-3.58 (m, 4H), 3.18-3.02 (m, 4H), 1.50 (s, 9H)

### Synthesis of Intermediate C132

[chemical structure]

[0395] To a solution of tert-butyl 4-(7-fluoro-2H-indazol-5-yl)piperazine-1-carboxylate (100 mg, 312 umol, 1.00 eq) and 2-bromo-4,6-dimethyl-pyrazolo[1,5-a]pyrazine (105 mg, 468 umol, 1.50 eq) in toluene (5.00 mL) was added Cs₂CO₃ (203 mg, 624 umol, 2.00 eq), (1R,2R)—N1,N2-dimethylcyclohexane-1,2-diamine (17.7 mg, 124 umol, 0.400 eq) and iodocopper tetrabutylammonium diiodide (69.9 mg, 62.4 umol, 0.200 eq). The reaction mixture was stirred at 120° C. for 16 hrs under N₂ protection. The reaction mixture was diluted with water (15.0 mL), extracted with ethyl acetate (3×5.00 mL), washed with brine (5.00 mL), dried over Na₂SO₄, filtered and the filtrate was concentrated under reduced pressure to give crude product. The crude product was purified by prep-HPLC (column: Waters Xbridge BEH C18 250*50 mm*10 um; mobile phase: [water(NH₄HCO₃)-acetonitrile]; B %: 45%-65%, 10 min) to give tert-butyl 4-[2-(4,6-dimethylpyrazolo[1,5-a]pyrazin-2-yl)-7-fluoro-indazol-5-yl]piperazine-1-carboxylate (EVAL-0123-0048-1, 5.00 mg, 3.44%) as a solid. LCMS: (ESI, m/z): 466.3 [M+H]⁺. ¹H NMR (400 MHz, methanol-d₄) δ ppm 8.78 (s, 1H) 8.31 (s, 1H) 7.28 (s, 1H) 7.02-7.05 (br d, J=13.88 Hz, 1H) 6.84 (s, 1H) 3.61 (br s, 4H) 3.13 (br d, J=4.63 Hz, 4H) 2.77 (s, 3H) 2.50 (s, 3H) 1.50 (s, 9H)

### Synthesis of Compound 213

[chemical structure]

[0396] To a solution of tert-butyl 4-[2-(4,6-dimethylpyrazolo[1,5-a]pyrazin-2-yl)-7-fluoro-indazol-5-yl]piperazine-1-carboxylate (5.00 mg, 10.7 μmol, 1.00 eq) in dioxane (1.00 mL) was added HCl/dioxane (4.00 M, 0.500 mL) at 0° C. The reaction was stirred at 25° C. for 1 hr The reaction mixture was concentrated under reduced pressure to give the crude product. The crude product was purified by prep-HPLC (column: Phenomenex Luna 80*30 mm*3 um; mobile phase: [water(HCl)-acetonitrile]; B %: 10%-40%, 8 min) to give 2-(7-fluoro-5-piperazin-1-yl-indazol-2-yl)-4,6-dimethyl-pyrazolo[1,5-a]pyrazine (2.00 mg, 47%) as a solid. LCMS: (ESI, m/z): 366.3 [M+H]⁺. ¹H NMR (400 MHz, METHANOL-d₄) δ ppm 8.95 (br d, J=9.51 Hz, 2H) 7.97 (s, 1H) 7.12 (d, J=13.51 Hz, 1H) 3.43 (br s, 8H) 3.08 (s, 3H) 2.67 (s, 3H)

### Example 71: Synthesis of Compound 214

### Synthesis of Intermediate C134

[chemical structure]

[0397] To a solution of 2-bromo-4,6-dimethyl-pyrazolo[1,5-a]pyrazine (1 g, 4.42 mmol) and 4,4,5,5-tetramethyl-2-(4,4,5,5-tetramethyl-1,3,2-dioxaborolan-2-yl)-1,3,2-dioxaborolane (2.25 g, 8.85 mmol) in dioxane (4.59 mL) was added (1,1 [symbol] bis(diphenylphosphino)ferrocenedichloro palladium(II) dichloromethane complex (485.49 mg, 663.50 μmol), 2-di-tert-butylphosphino-2,4,6-triisopropylbiphenyl (566.17 mg, 1.33 mmol) and potassium acetate (868.23 mg, 8.85 mmol) under N₂ protection. The reaction mixture was stirred at 100° C. for 2 hrs under N₂ protection. The reaction mixture was filtered via celite pad and washed with ethyl acetate (2 mL). The organic layer was concentrated under reduced pressure to give a residue. The residue was used in the next step without further purification. Crude product of 4,6-dimethyl-2-(4,4,5,5-tetramethyl-1,3,2-dioxaborolan-2-yl)pyrazolo[1,5-a]pyrazine (1 g, crude) was obtained as an oil. LCMS: (ESI, m/z): 192.4 [M+H]⁺. ¹H NMR (400 MHz, DMSO-d6) δ ppm 8.43 (s, 1H) 7.23 (d, J=0.86 Hz, 1H) 2.66 (s, 3H) 2.40 (s, 3H) 1.32 (s, 12H)

### Synthesis of Intermediate C135

[chemical structure]

[0398] To a solution of 4,6-dimethyl-2-(4,4,5,5-tetramethyl-1,3,2-dioxaborolan-2-yl)pyrazolo[1,5-a]pyrazine (200.00 mg, 439.34 μmol) in ethanol (2 mL) and H₂O (0.2 mL) was added K₃PO₄ (186.51 mg, 878.68 μmol), [2-(2-aminophenyl)phenyl]-chloro-palladium;dicyclohexyl-[2-(2,6-dimethoxyphenyl)phenyl]phosphane (B1C2, 31.66 mg, 43.93 μmol). The reaction mixture was stirred at 80° C. for 12 hrs. TLC (ethyl acetate=1, Rf=0.31) showed that the starting material was consumed and new spot was generated. The mixture was concentrated under reduced pressure to give the crude product. The crude product was purified by prep-HPLC to give tert-butyl 4-(5-(4,6-dimethylpyrazolo[1,5-a]pyrazin-2-yl)-2H-pyrazolo[4,3-b]pyridin-2-yl)piperidine-1-carboxylate (0.15 g, yield 76.29%) as a solid. ¹H NMR (400 MHz, DMSO-d6) δ ppm 8.82 (s, 1H) 8.53 (s, 1H) 8.21 (d, J=9.16 Hz, 1H) 8.08 (d, J=9.03 Hz, 1H) 7.53 (s, 1H) 4.71-4.87 (m, 1H) 4.08-4.20 (m, 2H) 2.92-3.08 (m, 2H) 2.74 (s, 3H) 2.44 (s, 3H) 2.17 (br dd, J=12.67, 2.26 Hz, 2H) 1.98-2.06 (m, 2H) 1.45 (s, 9H)

### Synthesis of Compound 214

[chemical structure]

[0399] A mixture of tert-butyl 4-[5-(4,6-dimethylpyrazolo[1,5-a]pyrazin-2-yl)pyrazolo[4,3-b]pyridin-2-yl]piperidine-1-carboxylate (0.15 g, 335.17 μmol) in dioxane/HCl (1 mL, 4M) was stirred for 1 hr at 25° C. under N₂. The mixture was concentrated and triturated by MTBE/DCM to give 5-(4,6-dimethylpyrazolo[1,5-a]pyrazin-2-yl)-2-(piperidin-4-yl)-2H-pyrazolo[4,3-b]pyridine (0.03 g, 23.32% yield) as a solid. LCMS: (ESI, m/z): 348.3 [M+H]⁺. ¹H NMR (400 MHz, METHANOL-d4) δ ppm 8.95 (s, 1H), 8.78 (s, 1H), 8.50 (d, J=9.1 Hz, 1H), 8.36 (d, J=9.0 Hz, 1H), 8.28 (s, 1H), 5.14-5.05 (m, 1H), 3.75-3.63 (m, 4H), 3.10 (s, 3H), 2.67 (d, J=0.8 Hz, 3H), 2.57-2.47 (m, 4H)

### Example 72: Synthesis of Compound 139

### Synthesis of Intermediate C137

[chemical structure]

[0400] To a mixture of 5,7-dichloro-2H-pyrazolo[3,4-c]pyridine (0.20 g, 1.06 mmol, 1.00 eq) in dimethyformamide (4.00 mL) was added Cs₂CO₃ (1.73 g, 5.32 mmol, 5.00 eq), KI (706 mg, 4.26 mmol, 4 eq) and tert-butyl 4-bromopiperidine-1-carboxylate (1.12 g, 4.26 mmol, 4.00 eq). The reaction mixture was stirred at 100° C. for 2 hrs. The mixture was dried under reduced pressure to give a brown solid. The brown solid was purified by prep-TLC to give tert-butyl 4-(5,7-dichloropyrazolo[3,4-c]pyridin-2-yl)piperidine-1-carboxylate (90.0 mg, 18.2%) as an oil. LCMS: (ESI, m/z): 371.1 [M+H]⁺. ¹H NMR (400 MHz, DMSO-d6) δ ppm 8.75 (s, 1H) 7.89 (s, 1H) 4.88 (tt, J=11.55, 3.96 Hz, 1H) 4.11 (br d, J=12.01 Hz, 2H) 2.95 (br d, J=7.75 Hz, 2H) 2.10-2.20 (m, 2H) 2.01 (br d, J=4.38 Hz, 1H) 1.90-1.98 (m, 1H) 1.43 (s, 9H)

### Synthesis of Intermediate C138

[chemical structure]

[0401] To a mixture of tert-butyl 4-(5,7-dichloropyrazolo[3,4-c]pyridin-2-yl)piperidine-1-carboxylate (50.0 mg, 134 umol, 1.00 eq) in phenyl methanol (780 mg, 7.21 mmol, 53.5 eq) was added NaOH (32.3 mg, 808 umol, 6.00 eq). The reaction mixture was stirred at 80° C. for 8 hrs. Water (10.0 mL) was added to quench the reaction and the reaction mixture was extracted with ethyl acetate (3×10.0 mL). The combined organic phase was washed with brine (10.0 mL), dried over Na₂SO₄, filtered and the filtrate was concentrated under reduced pressure to give an oil. The yellow oil was purified by chromatography on a silica gel (ethyl acetate/petroleum ether=0/1 to 1/0) to give tert-butyl 4-(7-benzyloxy-5-chloro-pyrazolo [3,4-c]pyridin-2-yl)piperidine-1-carboxylate (20.0 mg, 20.1%) as a solid. LCMS: (ESI, m/z): 443.2 [M+H]⁺. ¹H NMR (400 MHz, DMSO-d6) δ ppm 8.49 (s, 1H) 7.35-7.45 (m, 3H) 7.30-7.33 (m, 3H) 5.50 (s, 2H) 4.69-4.80 (m, 1H) 3.28-3.31 (m, 2H) 2.83-3.03 (m, 2H) 2.10 (br d, J=10.64 Hz, 2H) 1.87-1.93 (m, 2H) 1.41 (s, 9H)

### Synthesis of Intermediate C139

[chemical structure]

[0402] To a mixture of 6-chloro-2,8-dimethyl-imidazo[1,2-b]pyridazine (5.50 g, 30.3 mmol, 1.00 eq) in 1,4-dioxane (55.0 mL) was added bis(pinacolato)diboron (15.4 g, 60.6 mmol, 2.00 eq), potassium acetate (8.92 g, 90.9 mmol, 3.00 eq) and chloro(2-dicyclohexylphosphino-2 [symbol] [symbol] [symbol] triisopropyl-1,1 [symbol] phenyl)[2-(2 [symbol] amino-1,1 [symbol] phenyl)]palladium(ii) (2.40 g, 3.03 mmol, 0.100 eq). The reaction was stirred at 100° C. for 1 hr at argon protection. The mixture was filtered and the filtrate was concentrated under reduced pressure to give the 2,8-dimethyl-6-(4,4,5,5-tetramethyl-1,3,2-dioxaborolan-2-yl)imidazo[1,2-b]pyridazine (5.00 g, crude product) as black oil. The oil was used to next step without any purification. LCMS: (ESI, m/z): 192.2 [M−82+H]⁺.

### Synthesis of Intermediate C140

[chemical structure]

[0403] To a mixture of tert-butyl 4-(7-benzyloxy-5-chloro-pyrazolo[3,4-c]pyridin-2-yl)piperidine-1-carboxylate (200 mg, 452 umol, 1.00 eq) in 1,4-dioxane (1.60 mL) was added 2,8-dimethyl-6-(4,4,5,5-tetramethyl-1,3,2-dioxaborolan-2-yl)imidazo[1,2-b]pyridazine (185 mg, 677 umol, 1.50 eq), K₂CO₃ (187 mg, 1.35 mmol, 3.00 eq) in H₂O (0.40 mL) and [1,1-bis(diphenylphosphino)ferrocene]dichloropalladium(ii) (33.0 mg, 45.2 umol, 0.10 eq). The reaction mixture was stirred at 80° C. for 1 hr. Water (20.0 mL) was added to the reaction and the mixture was extracted with ethyl acetate (3×20.0 mL). The combined organic phase was washed with brine (30.0 mL), dried over Na₂SO₄, filtered and the filtrate was concentrated under reduced pressure to give yellow oil. The yellow oil was purified by chromatography on a silica gel (ethyl acetate/petroleum ether=0/1 to 3/1) to give tert-butyl 4-[7-benzyloxy-5-(2,8-dimethylimidazo[1,2-b]pyridazin-6-yl)pyrazolo[3,4-c]pyri-dine-2-yl]piperidine-1-carboxylate (200 mg, 80.0%) as a solid. LCMS: (ESI, m/z): 554.3 [M+H]⁺. ¹H NMR (400 MHz, DMSO-d6) δ ppm 8.65 (br s, 1H) 8.08-8.23 (m, 1H) 8.02 (br s, 1H) 7.90 (br s, 1H) 7.56-7.63 (m, 2H) 7.33-7.48 (m, 3H) 5.70 (br s, 2H) 4.64-4.86 (m, 1H) 3.93-4.21 (m, 4H) 2.81-3.08 (m, 2H) 2.62 (br s, 3H) 2.41 (br s, 3H) 2.07-2.17 (m, 2H) 1.43 (br s, 9H)

### Synthesis of Compound 139

[chemical structure]

[0404] A suspension of tert-butyl 4-[7-benzyloxy-5-(2,8-dimethylimidazo[1,2-b]pyridazin-6-yl) pyrazolo [3,4-c]pyridin-2-yl]piperidine-1-carboxylate (50.0 mg, 90.3 umol, 1.00 eq) in HCl/dioxane (1.00 mL) was stirred at 25° C. for 2 hrs. The reaction mixture was concentrated in vacuum to give residue. The residue was purified by prep-HPLC (Column: Phenomenex Luna 80×30 mm×3 um; mobile phase: [water (HCl)-acetonitrile]; B %: 1%-35%, 8 min) to give 5-(2,8-dimethylimidazo[1,2-b]pyridazin-6-yl)-2-(4-piperidyl)-6H-pyrazolo[3,4-c]pyridin-7-one (15.0 mg, 44.3%) as a solid. LCMS (ESI, m/z): 364.0[M+H]⁺. ¹H NMR (400 MHz, METHANOL-d4) δ ppm 8.42 (s, 1H) 8.31 (dd, J=10.21, 0.79 Hz, 2H) 7.71 (s, 1H) 4.90-4.97 (m, 1H) 3.65 (dt, J=12.99, 3.35 Hz, 2H) 3.26 (br d, J=9.17 Hz, 2H) 2.78 (d, J=0.73 Hz, 3H) 2.65 (s, 3H) 2.41-2.51 (m, 4H)

### Example 73: Synthesis of Compound 142

### Synthesis of Intermediate C142

[chemical structure]

[0405] To a mixture of 2,4,6-trimethyl-1,3,5,2,4,6-trioxatriborinane (362 mg, 1.44 mmol, 3.00 eq), tert-butyl 4-(7-bromo-5-chloro-pyrazolo[4,3-b]pyridin-2-yl)piperidine-1-carboxylate (200 mg, 481 umol, 1.00 eq) and K₂CO₃ (265 mg, 1.92 mmol, 4.00 eq) in dimethyformamide (2.00 mL) was added tetrakis[triphenylphosphine]palladium(0) (55.5 mg, 48.1 umol, 0.100 eq). The reaction mixture was stirred at 100° C. for 5 hrs. The reaction mixture was diluted with water (50.0 mL), extracted with ethyl acetate (3×50.0 mL), washed with brine (100 mL), dried over Na₂SO₄, filtered and the filtrate was concentrated under reduced pressure to give an oil. The oil was purified by chromatography on a silica gel eluted with ethyl acetate/petroleum ether=0/1 to 1/1 to give tert-butyl 4-(5-chloro-7-methyl-pyrazolo[4,3-b]pyridin-2-yl)piperidine-1-carboxylate (50.0 mg, 23.7%) as a solid. LCMS: (ESI, m/z): 351.2 [M+H]⁺. ¹H NMR (400 MHz, DMSO-d6) δ ppm 8.71 (s, 1H) 7.15 (s, 1H) 4.43-4.94 (m, 1H) 4.04-4.18 (m, 2H) 2.83-3.10 (m, 2H) 2.55 (s, 3H) 2.12 (br d, J=11.49 Hz, 2H) 1.90-2.01 (m, 2H) 1.43 (s, 9H)

### Synthesis of Intermediate C143

[chemical structure]

[0406] To a solution of tert-butyl 4-(5-chloro-7-methyl-pyrazolo[4,3-b]pyridin-2-yl)piperidine-1-carboxylate (80.0 mg, 228 umol, 1.00 eq) in dimethyformamide (0.100 mL) was added 6-(methoxymethoxy)-2-methyl-5-(4,4,5,5-tetramethyl-1,3,2-dioxaborolan-2-yl)indazole (108 mg, 342 umol, 1.50 eq), K₂CO₃ (126 mg, 912 umol, 4.00 eq) and bis(triphenylphosphine)palladium(II)diacetate (26.3 mg, 22.8 umol, 0.100 eq). The reaction was stirred at 100° C. for 5 hrs. The reaction mixture was purified by prep-HPLC (Column: Waters Xbridge BEH C18 100×30 mm×10 um; mobile phase: [water (NH₄HCO₃)-acetonitrile]; B %: 30%-60%, 8 min) to give tert-butyl 4-[5-[6-(methoxy methoxy)-2-methyl-indazol-5-yl]-7-methyl-pyrazolo[4,3-b]pyridin-2-yl]piperidine-1-carboxylate (17.0 mg, 14.7%) as a solid. LCMS: (ESI, m/z): 507.3 [M+H]⁺. ¹H NMR (400 MHz, DMSO-d6) δ ppm 8.69 (s, 1H) 8.31 (s, 1H) 7.82 (s, 1H) 7.36 (d, J=0.83 Hz, 1H) 7.18 (s, 1H) 5.23 (s, 2H) 4.74 (tt, J=11.40, 3.92 Hz, 1H) 4.13 (s, 5H) 3.35 (s, 3H) 2.86-3.07 (m, 2H) 2.56 (s, 3H) 2.15 (br d, J=9.78 Hz, 2H) 1.89-2.08 (m, 2H) 1.44 (s, 9H)

### Synthesis of Compound 142

[chemical structure]

[0407] A mixture of tert-butyl 4-[5-[6-(methoxymethoxy)-2-methyl-indazol-5-yl]-7-methyl-pyrazolo [4,3-b]pyridin-2-yl]piperidine-1-carboxylate (17.0 mg, 33.5 umol, 1.00 eq) in dioxane (0.400 mL) was added HCl/dioxane (10.0 M, 0.40 mL). The reaction mixture was stirred at 25° C. for 2 hrs. The reaction mixture was filtered. The filter cake was dried over in vacuum to give 2-methyl-5-[7-methyl-2-(4-piperidyl) pyrazolo [4,3-b]pyridin-5-yl]indazol-6-ol (9.76 mg, 80.2%) as a solid. LCMS: (ESI, m/z): 363.1 [M+H]⁺. ¹H NMR (400 MHz, METHANOL-d4) δ ppm 8.85 (s, 1H) 8.54 (s, 1H) 8.38 (s, 1H) 8.04 (d, J=0.88 Hz, 1H) 7.12 (s, 1H) 5.16 (tt, J=9.88, 5.05 Hz, 1H) 4.25 (s, 3H) 3.65-3.72 (m, 2H) 3.33-3.39 (m, 2H) 2.95 (s, 3H) 2.49-2.64 (m, 4H)

### Example 74: Synthesis of Compounds 167 and 168 Synthesis of Intermediates C₁₄₅ and C₁₄₆

[chemical structure]

[0408] Intermediate C144 (130 mg, 269 umol) was separated by SFC (column: Phenomenex-Cellulose-2 (250 mm×30 mm, 5 um); mobile phase: [0.1% NH₃H₂O methanol]; B %: 45%-45%, 9 min) to afford (3S,4S)-tert-butyl 4-(5-(2,8-dimethyl imidazo[1,2-b]pyridazin-6-yl)-7-fluoro-2H-indazol-2-yl)-3-fluoropiperidine-1-carboxylate (40.0 mg, 15.3%) as a solid and (3R,4R)-tert-butyl 4-(5-(2,8-dimethylimidazo[1,2-b]pyridazin-6-yl)-7-fluoro-2H-indazol-2-yl)-3-fluoropiperidine-1-carboxylate (59A, 40.0 mg, 15.3%) as a solid. Intermediate C145: LCMS: (ESI, m/z): 483.2 [M+H]⁺. ¹H NMR (400 MHz, chloroform-d) δ ppm 8.18 (d, J=2.32 Hz, 1H) 8.01 (d, J=0.86 Hz, 1H) 7.77 (s, 1H) 7.70 (dd, J=12.59, 0.98 Hz, 1H) 7.30 (s, 1H) 4.89-5.18 (m, 1H) 4.50-4.77 (m, 2H) 4.23-4.44 (m, 1H) δ ppm 2.82-3.07 (m, 2H) 2.73 (s, 3H) 2.48-2.66 (m, 4H) 2.21-2.35 (m, 1H) 1.51 (s, 9H) Intermediate C146: LCMS: (ESI, m/z): 483.2 [M+H]⁺. ¹H NMR (400 MHz, chloroform-d) δ ppm 8.18 (d, J=2.20 Hz, 1H) 8.01 (s, 1H) 7.77 (s, 1H) 7.71 (d, J=12.59 Hz, 1H) 7.31 (s, 1H) 4.92-5.19 (m, 1H) 4.48-4.82 (m, 2H) 4.18-4.45 (m, 1H) 2.83-3.08 (m, 2H) 2.73 (s, 3H) 2.48-2.64 (m, 4H) 2.21-2.34 (m, 1H) 1.51 (s, 9H)

### Synthesis of Compound 167

[chemical structure]

[0409] A mixture of (3 S,4S)-tert-butyl 4-(5-(2,8-dimethylimidazo[1,2-b]pyridazin-6-yl)-7-fluoro-2H-indazol-2-yl)-3-fluoropiperidine-1-carboxylate (8A, 40.0 mg, 83.0 umol, 1.00 eq) in dioxane (1.00 mL) was added HCl/dioxane (4 M, 980 μL, 38.6 eq). The reaction mixture was stirred at 25° C. for 2 hrs. The reaction was filtered and the filter cake was dried in vacuum to give 6-(7-fluoro-2-((3S,4S)-3-fluoropiperidin-4-yl)-2H-indazol-5-yl)-2,8-dimethylimidazo[1,2-b]pyridazine (35.0 mg, 77.2%) as a solid. LCMS: (ESI, m/z): 383.1 [M+H]⁺. ¹H NMR (400 MHz, deuterium oxide) δ ppm 8.67 (d, J=2.38 Hz, 1H) 8.19 (s, 1H) 7.98 (br d, J=5.50 Hz, 2H) 7.68 (d, J=12.76 Hz, 1H) 5.27-5.48 (m, 1H) 5.18 (qd, J=9.96, 5.25 Hz, 1H) 3.91-4.01 (m, 1H) 3.70 (br d, J=13.38 Hz, 1H) 3.30-3.49 (m, 2H) 2.63 (s, 5H) 2.51 (s, 3H)

### Synthesis of Compound 168

[chemical structure]

[0410] A solution of tert-butyl (3R,4R)-4-[5-(2,8-dimethylimidazo[1,2-b]pyridazin-6-yl)-7-fluoro-indazol-2-yl]-3-fluoro-piperidine-1-carboxylate (40.0 mg, 83.0 umol, 1.00 eq) in dioxane (1.00 mL) was added HCl/dioxane (4.00 M, 980 μL, 38.6 eq). The reaction mixture was stirred at 25° C. for 2 hrs. The reaction was filtered and the filter cake dried over in vacuum to give 6-(7-fluoro-2-((3R,4R)-3-fluoropiperidin-4-yl)-2H-indazol-5-yl)-2,8-dimethylimidazo [1,2-b]pyridazine (30.0 mg, 66.2%) as a solid. LCMS: (ESI, m/z): 383.1 [M+H]⁺. ¹H NMR (400 MHz, deuterium oxide) δ ppm 8.67 (d, J=2.50 Hz, 1H) 8.20 (s, 1H) 7.98 (d, J=7.00 Hz, 2H) 7.65-7.73 (m, 1H) 5.26-5.50 (m, 1H) 5.18 (qd, J=9.94, 5.32 Hz, 1H) 3.88-4.06 (m, 1H) 3.71 (br d, J=13.26 Hz, 1H) 3.27-3.51 (m, 2H) 2.55-2.68 (m, 5H) 2.51 (s, 3H)

### Example 75: Synthesis of Compound 192

### Synthesis of Intermediate C148

[chemical structure]

[0411] To a mixture of 5-bromo-2-nitro-benzaldehyde (41-1, 1.0 g, 4.35 mmol, 1.0 eq) and tert-butyl 4-aminopiperidine-1-carboxylate (957 mg, 4.78 mmol, 1.10 eq) in propan-2-ol (15.0 mL) was stirred at 80° C. for 2 hrs. The reaction was cooled to 25° C., and added tributylphosphane (2.64 g, 13.0 mmol, 3.22 mL, 3.0 eq). The reaction mixture was then stirred at 80° C. for 12 hrs. TLC (petroleum ether/ethyl acetate=5/1, Rf=0.4) showed the reaction was completed. The reaction mixture was quenched with water (30.0 mL), extracted with ethyl acetate (3×30.0 mL), washed with brine (30.0 mL), dried over Na₂SO₄, filtered and the filtrate was concentrated under reduced pressure to give residue. The residue was purified by flash column chromatography (petroleum ether/ethyl acetate=5/1) to give tert-butyl 4-(5-bromoindazol-2-yl) piperidine-1-carboxylate (41-3, 1.20 g, 72.5% yield) as an oil. LCMS: (ESI, m/z): 381.2 [M+1]⁺. ¹H NMR (400 MHz, chloroform-d) δ ppm 7.91 (s, 1H), 7.82 (d, J=0.9 Hz, 1H), 7.59 (d, J=9.1 Hz, 1H), 7.34 (dd, J=1.6, 9.1 Hz, 1H), 4.55 (tt, J=4.0, 11.5 Hz, 1H), 2.95 (br t, J=11.6 Hz, 2H), 2.29-2.20 (m, 2H), 2.14-2.06 (m, 2H), 1.76-1.56 (m, 2H), 1.49 (s, 9H)

### Synthesis of Intermediate C149

[chemical structure]

[0412] To a mixture of 2,8-dimethyl-6-(4,4,5,5-tetramethyl-1,3,2-dioxaborolan-2-yl)imidazo[1,2-b]pyridazine (143 mg, 525 umol, 1.0 eq), tert-butyl 4-(5-bromoindazol-2-yl)piperidine-1-carboxylate (200 mg, 525 umol, 1.0 eq) and potassium phosphate (446 mg, 2.10 mmol, 4.0 eq) in ethanol (20.0 mL) and H₂O (5.00 mL) was added Chloro(2-Dicyclohexylphosphino-2 [symbol] [symbol] [symbol] Triisopropyl-1,1 [symbol] Biphenyl)[2-(2 [symbol] Amino-1,1 [symbol] Biphenyl)]Palladium(Ii) (41.3 mg, 52.5 umol, 0.100 eq). The reaction mixture was then stirred at 80° C. for 12 hrs. The reaction mixture was diluted with water (50.0 mL), extracted with ethyl acetate (3×50.0 mL), washed with brine (30.0 mL), dried over Na₂SO₄, filtered and the filtrate was concentrated under reduced pressure to give residue. The residue was purified by flash column chromatography (petroleum ether/ethyl acetate=5/1) to give tert-butyl 4-[5-(2,8-dimethylimidazo[1,2-b]pyridazin-6-yl)indazol-2-yl]piperidine-1-carboxylate (200 mg, 42.5%) as a solid. LCMS: (ESI, m/z): 447.3 [M+H]⁺. ¹H NMR (400 MHz, chloroform-d) δ ppm 8.21 (s, 1H), 8.07 (s, 1H), 7.94 (dd, J=1.6, 9.1 Hz, 1H), 7.82 (d, J=9.1 Hz, 1H), 7.77 (s, 1H), 7.31 (s, 1H), 4.67-4.55 (m, 1H), 3.03-2.92 (m, 2H), 2.72 (s, 3H), 2.54 (s, 3H), 2.33-2.25 (m, 3H), 2.20-2.10 (m, 2H), 2.07 (s, 1H), 1.50 (s, 9H)

### Synthesis of Compound 192

[chemical structure]

[0413] A solution of tert-butyl 4-[5-(2,8-dimethylimidazo[1,2-b]pyridazin-6-yl)indazol-2-yl]piperidine-1-carboxylate (41-4, 200 mg, 447 umol, 1.0 eq) in HCl/methanol (4.0 M, 0.100 mL) was stirred at 25° C. for 1 hr. The reaction mixture was filtered and the filter cake was dried in vacuum to give residue. The residue was triturated with methyl tert-butyl ether (5.00 mL) and filtered. The filter cake was dried in vacuum to give 2,8-dimethyl-6-[2-(4-piperidyl)indazol-5-yl]imidazo[1,2-b]pyridazine (69.9 mg, 42.8%) as a solid. LCMS: (ESI, m/z): 347.1 [M+H]⁺. ¹H NMR (400 MHz, methanol-d4) δ ppm 8.61-8.54 (m, 2H), 8.30 (dd, J=0.9, 6.1 Hz, 2H), 8.13 (dd, J=1.7, 9.2 Hz, 1H), 7.81 (d, J=9.3 Hz, 1H), 5.02-4.93 (m, 1H), 3.71-3.62 (m, 2H), 3.37-3.33 (m, 2H), 2.79 (d, J=1.0 Hz, 3H), 2.65 (d, J=0.8 Hz, 3H), 2.54-2.44 (m, 4H)

### Example 76: Synthesis of Compound 196

[chemical structure]

[0414] To a solution of 6-(7-fluoro-2-((3S,4S)-3-fluoropiperidin-4-yl)-2H-indazol-5-yl)-2,8-dimethylimidazo[1,2-b]pyridazine (35.0 mg, 91.6 umol, 1.00 eq) in methanol (0.300 mL) was added N,N-diethylethanamine (21.8 mg, 215 umol, 2.75 eq) and paraformaldehyde (2.36 mg, 78.5 umol, 1.00 eq). The reaction mixture was stirred at 25° C. for 10 min. Then, acetic acid (0.010 mL) and sodium cyanoboro-hydride (12.3 mg, 196 umol, 2.50 eq) was added. The reaction mixture was stirred at 25° C. for 12 hrs. The reaction mixture was filtered and the filter cake was purified by prep-HPLC (column: Waters Xbridge Prep OBD C18 150×40 mm×10 um; mobile phase: [water (NH₄HCO₃)-acetonitrile]; B %: 25%-55%, 8 min) to give 6-[7-fluoro-2-[(3S,4S)-3-fluoro-1-methyl-4-piperidyl]indazol-5-yl]-2,8-dimethyl-imidazo[1,2-b]pyridazine (4.10 mg, 13.2%) as a solid. LCMS: (ESI, m/z): 397.2 [M+H]⁺. ¹H NMR (400 MHz, DMSO-d6) δ ppm 8.80 (d, J=2.63 Hz, 1H) 8.32 (s, 1H) 8.03 (s, 1H) 7.68-7.85 (m, 2H) 4.96-5.24 (m, 1H) 4.66-4.89 (m, 1H) 3.29 (br d, J=5.38 Hz, 1H) 2.89 (br d, J=11.38 Hz, 1H) 2.60 (s, 3H) 2.40 (s, 3H) 2.32 (s, 3H) 2.08-2.29 (m, 4H)

### Example 77: Synthesis of Compound 197

[chemical structure]

[0415] To a solution of 6-(7-fluoro-2-((3R,4R)-3-fluoropiperidin-4-yl)-2H-indazol-5-yl)-2,8-dimethylimidazo[1,2-b]pyridazine (30.0 mg, 78.5 umol, 1.00 eq) in methanol (0.300 mL) was added N,N-diethylethanamine (21.8 mg, 215 umol, 2.75 eq) and paraformaldehyde (2.36 mg, 78.5 umol, 1.00 eq). The mixture was stirred at 25° C. for 10 min. Then, acetic acid (0.01 mL) and sodium cyanoborohydride (12.3 mg, 196 umol, 2.50 eq) was added. The reaction mixture was stirred at 25° C. for 12 hrs. The mixture was quenched with water (1 mL) and purified by prep-HPLC (column: Waters Xbridge Prep OBD C18 150×40 mm×10 um; mobile phase: [water (NH₄HCO₃)-acetonitrile]; B %: 25%-55%, 8 min) to give 6-(7-fluoro-2-((3R,4R)-3-fluoro-1-methylpiperidin-4-yl)-2H-indazol-5-yl)-2,8-dimethylimidazo[1,2-b]pyridazine (8.10 mg, 26.0%) as a solid. LCMS: (ESI, m/z): 397.2 [M+H]⁺. ¹H NMR (400 MHz, DMSO-d6) δ ppm 8.80 (d, J=2.13 Hz, 1H) 8.32 (s, 1H) 8.04 (s, 1H) 7.68-7.82 (m, 2H) 4.99-5.24 (m, 1H) 4.68-4.85 (m, 1H) 3.29 (br s, 1H) 2.89 (br d, J=11.38 Hz, 1H) 2.60 (s, 3H) 2.40 (s, 3H) 2.32 (s, 3H) 2.09-2.29 (m, 4H)

### Example 78: Synthesis of Compound 198

[chemical structure]

[0416] To a solution of 6-[2-(5-azaspiro[3.5]nonan-8-yl)-7-fluoro-indazol-5-yl]-2,8-dimethyl-imidazo [1,2-b]pyridazine (40.0 mg, 98.8 umol, 1.00 eq) in methanol (0.400 mL) was added triethylamine (20.0 mg, 197 umol, 2.00 eq). The reaction was stirred at 25° C. for 30 min. Then, acetaldehyde (5.00 M, 39.5 uL, 2.00 eq), acetic acid (5.94 mg, 98.8 umol, 1.00 eq) and sodium cyanoborohydride (9.32 mg, 148 umol, 1.50 eq) was added to the above mixture at 0° C. under N₂ protection. The reaction mixture was stirred at 25° C. for 12 hrs. The reaction mixture quenched by water (1.00 mL), extracted with ethyl acetate (1.00 mL×3), dried over Na₂SO₄, filtered and concentrated under reduced pressure to give residue. The residue was purified by prep-HPLC (column: Waters Xbridge BEH C18 100*30 mm*10 um; mobile phase: [water (NH₄HCO₃)-acetonitrile]; B %: 35%-65%, 8 min) to give 6-[2-(5-ethyl-5-azaspiro[3.5]nonan-8-yl)-7-fluoro-indazol-5-yl]-2,8-dimethyl-imidazo[1,2-b]pyridazine (13.0 mg, 30.3%) as a solid. LCMS: (ESI, m/z): 433.2 [M+H]⁺. ¹H NMR (400 MHz, METHANOL-d4) δ ppm 8.57 (d, J=2.63 Hz, 1H) 8.22 (s, 1H) 7.90 (s, 1H) 7.77 (d, J=13.01 Hz, 1H) 7.64 (s, 1H) 4.70-4.76 (m, 1H) 3.10-3.16 (m, 1H) 2.91-3.03 (m, 1H) 2.63-2.75 (m, 4H) 2.43-2.53 (m, 4H) 2.40 (br dd, J=12.76, 2.00 Hz, 1H) 2.23-2.36 (m, 3H) 2.12-2.23 (m, 2H) 1.95 (br d, J=12.76 Hz, 1H) 1.76-1.92 (m, 3H) 1.17 (t, J=7.19 Hz, 3H)

### Example 79: Synthesis of Compounds 204-206

### Synthesis of Intermediate C151

[chemical structure]

[0417] To a solution of 5-bromo-7-fluoro-2H-indazole (52-1, 1.00 g, 4.65 mmol, 1.00 eq) and tert-butyl 7-(p-tolylsulfonyloxy)-4-azaspiro[2.5]octane-4-carboxylate (1.95 g, 5.12 mmol, 1.10 eq) in N,N-dimethylformamide (25.0 mL) was added Cs₂CO₃ (4.55 g, 13.9 mmol, 3.00 eq). The reaction mixture was stirred at 100° C. for 2 hrs. The reaction mixture was diluted with H₂O (100.0 mL), extracted with ethyl acetate (3×50.0 mL). The organic layer was washed with brine (3×50.0 mL), dried over Na₂SO₄, filtered and concentrated under reduced pressure to give an oil. The oil was purified by prep-HPLC (column: Waters Xbridge Prep OBD C18 150×40 mm×10 um; mobile phase: [water (NH₄HCO₃)-acetonitrile]; B %: 60%-90%, 8 min) to give tert-butyl 7-(5-bromo-7-fluoro-indazol-2-yl)-4-azaspiro[2.5]octane-4-carboxylate (1.10 g, 27.3%). LCMS: (ESI, m/z): 368.5 [M+H]⁺. ¹H NMR (400 MHz, DMSO-d6) δ ppm 8.58 (d, J=2.75 Hz, 1H) 7.81 (d, J=1.50 Hz, 1H) 7.26 (dd, J=11.01, 1.50 Hz, 1H) 4.84-5.05 (m, 1H) 4.01-4.06 (m, 1H) 3.02 (br t, J=12.13 Hz, 1H) 2.37 (br t, J=11.88 Hz, 1H) 2.13 (br dd, J=12.51, 1.88 Hz, 1H) 1.87-1.98 (m, 1H) 1.53 (dd, J=12.44, 3.44 Hz, 1H) 1.43 (s, 9H) 1.14-1.17 (m, 1H) 0.83-0.95 (m, 1H) 0.54-0.72 (m, 2H).

### Synthesis of Intermediate C152

[chemical structure]

[0418] To a solution of tert-butyl 7-(5-bromo-7-fluoro-indazol-2-yl)-4-azaspiro[2.5]octane-4-carboxylate (200 mg, 471 umol, 1.00 eq) and bis(pinacolato)diboron (239 mg, 942 umol, 2.00 eq) in 1,4-dioxane (2.00 mL) was added potassium acetate (138 mg, 1.41 mmol, 3.00 eq) and chloro(2-dicyclohexylphosphino-2′,4′,6′-triisopropyl-1,1′-biphenyl)[2-(2′-amino-1,1′-biphenyl)]palladium (37.0 mg, 47.1 umol, 0.10 eq). The reaction was stirred at 100° C. for 1 hr. The reaction mixture was filtered and the filtrate was concentrated in vacuum to give tert-butyl 7-[7-fluoro-5-(4,4,5,5-tetramethyl-1,3,2-dioxaborolan-2-yl)indazol-2-yl]-4-azaspiro[2.5]octane-4-carboxylate (52-5B, 524 mg, crude) as an oil. The oil was used to the next step directly without further purification. LCMS: (ESI, m/z): 472.6 [M+H]⁺.

### Synthesis of Intermediate C153

[chemical structure]

[0419] To a mixture of tert-butyl 7-[7-fluoro-5-(4,4,5,5-tetramethyl-1,3,2-dioxaborolan-2-yl)indazol-2-yl]-4-azaspiro[2.5]octane-4-carboxylate (521 mg, 1.11 mmol, 2.00 eq) and 2-bromo-4,6-dimethyl-pyrazolo[1,5-a]pyrazine (125 mg, 552 umol, 1.00 eq) in 1,4-dioxane (1.26 mL) was added a solution of K₃PO₄ (352 mg, 1.66 mmol, 3.00 eq) in H₂O (0.260 mL) and 1,1 [symbol] bis(diphenylphosphino)ferrocenedichloro palladium(II) dichloromethane complex (36.0 mg, 55.2 umol, 0.10 eq) successively under N₂ protection. The reaction was stirred at 80° C. for 2.5 hrs. The reaction mixture was diluted with H₂O (50.0 mL), extracted with ethyl acetate (3×50.0 mL). The combined organic layer was dried over Na₂SO₄, filtered and concentrated under reduced pressure to give an oil. The oil was purified by column chromatography on silica gel eluted with petroleum ether/ethyl acetate (10/1 to 0/1) to give tert-butyl 7-[5-(4,6-dimethylpyrazolo[1,5-a]pyrazin-2-yl)-7-fluoro-indazol-2-yl]-4-azaspiro[2.5]octane-4-carboxylate (52-5, 80.0 mg, 29.4%) as a solid. LCMS: (ESI, m/z): 491.6 [M+H]⁺. ¹H NMR (400 MHz, CHLOROFORM-d) δ ppm 8.09 (s, 1H) 8.03-8.06 (m, 2H) 7.58 (d, J=12.38 Hz, 1H) 6.95 (s, 1H) 4.88 (tt, J=11.74, 4.14 Hz, 1H) 4.24-4.36 (m, 1H) 3.01-3.15 (m, 1H) 2.78 (s, 3H) 2.52 (s, 4H) 2.29-2.38 (m, 1H) 2.08-2.19 (m, 1H) 1.64-1.70 (m, 1H) 1.51 (s, 9H) 0.94-1.02 (m, 1H) 0.81-0.92 (m, 1H) 0.61-0.72 (m, 2H).

### Synthesis of Compound 204

[chemical structure]

[0420] To a solution of tert-butyl 7-[5-(4,6-dimethylpyrazolo[1,5-a]pyrazin-2-yl)-7-fluoro-indazol-2-yl]-4-azaspiro[2.5]octane-4-carboxylate (52-5, 75.0 mg, 152 umol, 1.00 eq) in methanol (2.00 mL) was added HCl/methanol (4.00 M, 1.53 mL, 40.0 eq). The reaction mixture was stirred at 25° C. for 1 hr. The reaction mixture was filtered. The filter cake was dried over in vacuum to give 2-[2-(4-azaspiro[2.5]octan-7-yl)-7-fluoro-indazol-5-yl]-4,6-dimethyl-pyrazolo[1,5-a]pyrazine (4.46 mg, 7.39%) as a solid. LCMS: (ESI, m/z): 391.1 [M+H]⁺. 1H NMR (400 MHz, METHANOL-d4) δ ppm 8.91 (s, 1H) 8.59 (d, J=2.64 Hz, 1H) 8.34 (d, J=0.88 Hz, 1H) 8.06 (s, 1H) 7.76 (dd, J=12.55, 1.00 Hz, 1H) 5.04-5.17 (m, 1H) 3.68 (dt, J=12.74, 3.48 Hz, 1H) 3.38-3.50 (m, 1H) 3.08 (s, 3H) 2.88-2.97 (m, 1H) 2.66 (s, 3H) 2.52-2.59 (m, 2H) 1.96 (dd, J=13.99, 3.45 Hz, 1H) 1.12-1.21 (m, 2H) 1.05-1.11 (m, 1H) 0.96-1.02 (m, 1H).

### Synthesis of Intermediates C154 and C155

[chemical structure]

[0421] Intermediate C153 (500 mg) was separated by SFC (column: (s,s) WHELK-O1 (250 mm×30 mm, 5 um); mobile phase: [0.1% NH₃H₂O ethanol]; B %: 50%-50%, 10 min) to afford tert-butyl (7R)-7-[5-(4,6-dimethylpyrazolo[1,5-a]pyrazin-2-yl)-7-fluoro-indazol-2-yl]-4-azaspiro[2.5]octane-4 carboxylate (140 mg, 28.0%) as a solid and tert-butyl (7S)-7-[5-(4,6-dimethylpyrazolo[1,5-a]pyrazin-2-yl)-7-fluoro-indazol-2-yl]-4-azaspiro[2.5]octane-4-carboxylate (150 mg, 30.0%) as a solid. Intermediate C154: LCMS: (ESI, m/z): 491.4 [M+H]⁺. ¹H NMR (400 MHz, CHLOROFORM-d) δ ppm 8.09 (s, 1H) 8.02-8.06 (m, 2H) 7.58 (dd, J=12.38, 1.00 Hz, 1H) 6.95 (s, 1H) 4.79-4.98 (m, 1H) 4.28 (br d, J=13.13 Hz, 1H) 3.04-3.16 (m, 1H) 2.78 (s, 3H) 2.49-2.62 (m, 4H) 2.33 (br d, J=11.13 Hz, 1H) 2.06-2.21 (m, 1H) 1.66-1.70 (m, 1H) 1.51 (s, 9H) 1.40 (dt, J=9.44, 6.66 Hz, 1H) 0.92-1.04 (m, 1H) 0.61-0.73 (m, 2H) Intermediate C155: LCMS: (ESI, m/z): 491.4 [M+H]⁺. ¹H NMR (400 MHz, CHLOROFORM-d) δ ppm 8.09 (s, 1H) 8.02-8.07 (m, 2H) 7.58 (dd, J=12.38, 0.88 Hz, 1H) 6.95 (s, 1H) 4.79-4.99 (m, 1H) 4.28 (br d, J=13.63 Hz, 1H) 2.98-3.19 (m, 1H) 2.78 (s, 3H) 2.48-2.64 (m, 4H) 2.22-2.39 (m, 1H) 2.06-2.19 (m, 1H) 1.66-1.70 (m, 1H) 1.48-1.54 (m, 9H) 1.40 (dt, J=9.44, 6.47 Hz, 1H) 0.93-1.03 (m, 1H) 0.62-0.72 (m, 2H)

### Synthesis of Compound 206

[chemical structure]

[0422] To a solution of tert-butyl (7R)-7-[5-(4,6-dimethylpyrazolo[1,5-a]pyrazin-2-yl)-7-fluoro-indazol-2-yl]-4-azaspiro[2.5]octane-4-carboxylate (120 mg, 244 umol, 1.00 eq) in methanol (2.40 mL) was added HCl/methanol (4.00 M, 2.38 mL). The reaction mixture was stirred at 25° C. for 1 hr. LCMS showed the reaction mixture was completed. The reaction mixture was filtered. The filter cake was dried in vacuum to get a solid. The solid was diluted with H₂O (5.00 mL) and lyophilized to give 2-[2-[(7R)-4-azaspiro[2.5]octan-7-yl]-7-fluoro-indazol-5-yl]-4,6-dimethyl-pyrazolo[1,5-a]pyrazine (37.0 mg, 38.8%) as a solid. LCMS: (ESI, m/z): 391.3 [M+H]⁺. ¹H NMR (400 MHz, METHANOL-d4) δ ppm 8.91 (s, 1H) 8.59 (d, J=2.51 Hz, 1H) 8.34 (d, J=0.88 Hz, 1H) 8.05 (s, 1H) 7.76 (dd, J=12.49, 0.94 Hz, 1H) 5.04-5.17 (m, 1H) 3.68 (dt, J=12.71, 3.31 Hz, 1H) 3.39-3.50 (m, 1H) 3.08 (s, 3H) 2.92 (t, J=12.49 Hz, 1H) 2.65 (s, 3H) 2.51-2.60 (m, 2H) 1.89-2.00 (m, 1H) 0.96-1.18 (m, 4H).

### Synthesis of Compound 205

[chemical structure]

[0423] To a solution of tert-butyl (7S)-7-[5-(4,6-dimethylpyrazolo[1,5-a]pyrazin-2-yl)-7-fluoro-indazol-2-yl]-4-azaspiro[2.5]octane-4-carboxylate (52-5B, 130 mg, 265 umol, 1.00 eq) in methanol (2.60 mL) was added HCl/methanol (4.00 M, 2.58 mL). The reaction mixture was stirred at 25° C. for 1 hr. The reaction mixture was filtered. The filter cake was dried in vacuum to get yellow solid. The solid was diluted with H₂O (5.00 mL) and filtered. The filter cake was dried over in vacuum to give 2-[2-[(7S)-4-azaspiro[2.5]octan-7-yl]-7-fluoro-indazol-5-yl]-4,6-dimethyl-pyrazolo[1,5-a]pyrazine (53.5 mg, 51.7%) as a solid. LCMS: (ESI, m/z): 391.2 [M+H]⁺. ¹H NMR (400 MHz, METHANOL-d4) δ ppm 8.90 (s, 1H) 8.59 (d, J=2.51 Hz, 1H) 8.34 (d, J=1.00 Hz, 1H) 8.05 (s, 1H) 7.76 (dd, J=12.55, 1.00 Hz, 1H) 5.04-5.14 (m, 1H) 3.69 (dt, J=12.77, 3.53 Hz, 1H) 3.39-3.51 (m, 1H) 3.08 (s, 3H) 2.86-2.97 (m, 1H) 2.65 (d, J=0.75 Hz, 3H) 2.51-2.59 (m, 2H) 1.91 (br d, J=5.90 Hz, 1H) 0.96-1.20 (m, 4H).

### Example 80: Synthesis of Compound 175

[chemical structure]

[0424] To a solution of 6-[2-[(7S)-4-azaspiro[2.5]octan-7-yl]-7-fluoro-indazol-5-yl]-2,8-dimethyl-imidazo[1,2-b]pyridazine (90.0 mg, 230 umol, 1.00 eq) in methanol (1.00 mL) was added triethylamine (46.6 mg, 461 umol, 64.1 uL, 2.00 eq) at 25° C. The reaction mixture was stirred at 25° C. for 30 min. Then formaldehyde (55.3 mg, 1.84 mmol, 50.8 uL, 8.00 eq) and acetic acid (27.6 mg, 461 umol, 26.3 uL, 2.00 eq) was added. The reaction mixture was stirred at 25° C. for 10 min and sodium cyanoborohydride (43.4 mg, 691 umol, 3.00 eq) was added to the mixture at 0° C. The reaction mixture was stirred at 25° C. for 8 hrs. The reaction mixture was poured into saturated aqueous NaHCO₃ (5.00 mL) and extracted with ethyl acetate (5.00 mL×3). The combined organic layer was dried over Na₂SO₄, filtered and concentrated under reduced pressure to give a residue. The residue was purified by prep-HPLC (column: Waters Xbridge BEH C18 100*30 mm*10 um; mobile phase: [water (NH₄HCO₃)-acetonitrile]; B %: 30%-70%, 8 min) to give 6-[7-fluoro-2-[(7S)-4-methyl-4-azaspiro[2.5]octan-7-yl]indazol-5-yl]-2,8-dimethyl-imidazo[1,2-b]pyridazine (EVAL-0167-0046, 82.0 mg, 88.0%) as white solid. LCMS: (ESI, m/z): 405.2 [M+H]⁺. ¹H NMR (400 MHz, METHANOL-d4) δ ppm 8.55 (d, J=2.62 Hz, 1H) 8.19 (s, 1H) 7.89 (s, 1H) 7.72-7.79 (m, 1H) 7.61 (s, 1H) 4.77-4.86 (m, 1H) 3.14-3.24 (m, 1H) 3.01-3.12 (m, 1H) 2.83 (br t, J=12.34 Hz, 1H) 2.63-2.69 (m, 3H) 2.51-2.61 (m, 4H) 2.45-2.51 (m, 3H) 1.97 (br dd, J=12.99, 1.55 Hz, 1H) 1.34 (br dd, J=12.93, 2.09 Hz, 1H) 0.72-0.80 (m, 2H) 0.63-0.72 (m, 1H) 0.52-0.61 (m, 1H)

### Example 81: Synthesis of Compound 176

[chemical structure]

[0425] To a solution of 6-[2-[(7R)-4-azaspiro[2.5]octan-7-yl]-7-fluoro-indazol-5-yl]-2,8-dimethyl-imidazo[1,2-b]pyridazine (90.0 mg, 230 umol, 1.00 eq) in methanol (1.00 mL) was added triethylamine (46.6 mg, 461 umol, 64.1 uL, 2.00 eq) at 25° C. The reaction mixture was stirred at 25° C. for 30 min. Then formaldehyde (55.3 mg, 1.84 mmol, 50.8 uL, 8.00 eq) and acetic acid (27.6 mg, 461 umol, 26.3 uL, 2.00 eq) was added. The reaction mixture was stirred at 25° C. for 10 min and sodium cyanoborohydride (43.4 mg, 691 umol, 3.00 eq) was added to the mixture at 0° C. The reaction mixture was stirred at 25° C. for 8 hrs. The reaction mixture was poured into saturated aqueous NaHCO₃ (5.00 mL) and extracted with ethyl acetate (5.00 mL×3). The combined organic layer was dried over Na₂SO₄, filtered and concentrated under reduced pressure to give a residue. The residue was purified by prep-HPLC (column: Waters Xbridge BEH C18 100*30 mm*10 um; mobile phase: [water (NH₄HCO₃)-acetonitrile]; B %: 30%-70%, 8 min) to give 6-[7-fluoro-2-[(7R)-4-methyl-4-azaspiro[2.5]octan-7-yl]indazol-5-yl]-2,8-dimethyl-imidazo[1,2-b]pyridazine (82.7 mg, 204 umol, 88.7%) as a solid. LCMS: (ESI, m/z): 405.2 [M+H]⁺. ¹H NMR (400 MHz, METHANOL-d4) δ ppm 8.55 (d, J=2.74 Hz, 1H) 8.19 (d, J=0.95 Hz, 1H) 7.86-7.91 (m, 1H) 7.75 (dd, J=13.05, 1.13 Hz, 1H) 7.62 (d, J=0.83 Hz, 1H) 4.76-4.84 (m, 1H) 3.13-3.25 (m, 1H) 3.01-3.10 (m, 1H) 2.83 (t, J=12.40 Hz, 1H) 2.65 (d, J=0.72 Hz, 3H) 2.51-2.61 (m, 4H) 2.48 (s, 3H) 1.97 (br dd, J=12.87, 1.79 Hz, 1H) 1.30-1.40 (m, 1H) 0.70-0.80 (m, 2H) 0.62-0.70 (m, 1H) 0.52-0.61 (m, 1H)

### Example 82: Exemplary Splicing Assay for Monitoring Expression Levels of Splice Variants

[0426] Compounds described herein were used to modulate RNA transcript abundance in cells. The expression of a target mRNA was measured by detecting the formation of an exon-exon junction in the canonical transcript (CJ). A compound mediated exon-inclusion event was detected by observing an increase in formation of a new junction with an alternative exon (AJ). Real-time qPCR assays were used to detect these splicing switches and interrogate the potency of various compounds towards different target genes. A high-throughput real time quantitative PCR (RT-qPCR) assay was developed to measure these two isoforms of the mRNA (CJ and AJ) for exemplary genes, such as HTT, SMN2, and MYB, together with a control housekeeping gene, GAPDH or GUSB or PPIA, used for normalization. Briefly, the A673 or K562 cell line was treated with various compounds described herein (e.g., compounds of Formula (I)). After treatment, the levels of the HTT, MYB, or SMN2 mRNA targets were determined from each sample of cell lysate by cDNA synthesis followed by qPCR.

### Materials

[0427] Cells-to-C_{T} 1-step kit: ThermoFisher A25602, Cells-to-C_{T} lysis reagent: ThermoFisher 4391851C, TaqMan™ Fast Virus 1-Step Master Mix: ThermoFisher 4444436
[0428] GAPDH: VIC-PL, ThermoFisher 4326317E (Assay: Hs99999905_m1)—used for K562/suspension cell lines
[0429] GUSB: VIC-PL, ThermoFisher 4326320E (Assay: Hs99999908_m1)—used for K562/suspension cell lines
[0430] PPIA: VIC-PL, ThermoFisher 4326316E (Assay: Hs99999904_m1)—used for A673/adherent cell lines

### Probe/Primer Sequences

Canonical junction (CJ)
HTT Primer 1:
TCCTCCTGAGAAAGAGAAGGAC
HTT Primer 2:
GCCTGGAGATCCAGACTCA
HTT CY5-Probe:
/5Cy5/TGGCAACCCTTGAGGCCCTGTCCT/3IAbRQSp/
MYB Primer 1:
CCTCATTGGTCACAAATTGACTG
MYB Primer 2:
TGGAGAGCTTTCTAAGATTGACC
MYB CY5-Probe:
/5Cy5/AGGAAAATACTGTTTTTAGAACCCCAG/3IAbRQSp/
Alternative junction (AJ)
HTT Primer 1:
TCCTGAGAAAGAGAAGGACATTG
HTT Primer 2:
CTGTGGGCTCCTGTAGAAATC
HTT FAM-Probe:
/56-FAM/TGGCAACCC/ZEN/TTGAGAGGCAAGCCCT/3IABKFQ/
MYB Primer 1:
CAACACCATTTCATAGAGACCAGAC
MYB Primer 2:
GTTCTAAAATCATCCCTTGGCTTCTAAT
MYB FAM-Probe:
/56-FAM/AAATACTGT/ZEN/ATAGGACCTCTTCTGACATC
C/3IABKFQ/

### Description

[0431] The A673 cell line was cultured in DMEM with 10% FBS. Cells were diluted with full growth media and plated in a 96-well plate (15,000 cells in 100 ul media per well). The plate was incubated at 37° C. with 5% CO₂ for 24 hours to allow cells to adhere. An 11-point 3-fold serial dilution of the compounds was made in DMSO then diluted in media in an intermediate plate. Compounds were transferred from the intermediate plate to the cell plate with the top dose at a final concentration of 10 uM in the well. Final DMSO concentration was kept at or below 0.25%. The cell plate was returned to the incubator at 37° C. with 5% CO₂ for an additional 24 hours.

[0432] The K562 cell line was cultured in IMDM with 10% FBS. For K562, cells were diluted with full growth media and plated in either a 96-well plate (50,000 cells in 50 uL media per well) or a 384-well plate (8,000-40,000 cells in 45 uL media per well). An 11-point 3-fold serial dilution of the compounds were made in DMSO then diluted in media in an intermediate plate. Compound was transferred from the intermediate plate to the cell plate with the top dose at a final concentration of 10 uM in the well. Final DMSO concentration was kept at or below 0.25%. Final volume was 100 uL for 96-well plate and 50 uL for 384-well plate. The cell plate was then placed in an incubator at 37° C. with 5% CO2 for 24 hours.

[0433] The cells were then gently washed with 50 uL-100 uL cold PBS before proceeding to addition of lysis buffer. 30 uL-50 μL of room temperature lysis buffer with DNAse I (and optionally RNAsin) was added to each well. Cells were shaken/mixed thoroughly at room temperature for 5-10 minutes for lysis to take place and then 3 uL-5 μL of room temperature stop solution was added and wells were shaken/mixed again. After 2-5 minutes, the cell lysate plate was transferred to ice for RT-qPCR reaction setup. The lysates could also be frozen at −80° C. for later use.

[0434] In some cases, a direct lysis buffer was used. An appropriate volume of 3× lysis buffer (10 mM Tris, 150 mM NaCl, 1.5%-2.5% Igepal and 0.1-1 U/uL RNAsin, pH 7.4) was directly added to either K562 or A673 cells in media and mixed by pipetting 3 times. The plates were then incubated at room temperature with shaking/rocking for 20-50 minutes to allow for lysis to take place. After this time, the cell lysate plate was transferred to ice to set up for the RT-qPCR reactions. The lysates could also be frozen at −80° C. for later use.

[0435] To set up 10 uL RT-qPCR reactions, cell lysates were transferred to 384-well qPCR plates containing the master mix according to the table below. The plates were sealed, gently vortexed, and spun down before the run. The volumes were adjusted accordingly in some instances where the reaction was carried in 20 μL. The table below summarizes the components of the RT-qPCR reactions:

| Component | 1X |
|---|---|
| Taqman 1-step RT-qPCR mix (4X) | 2.5 |
| 20X AJ Primers + Probe (FAM) | 0.5 |
| 20X CJ Primers + Probe (CY5) | 0.5 |
| 20X PPIA Control (VIC) | 0.5 |
| Cell lysate (1X) | 1-2 |
| H₂O | 4-5 |
| Total volume | 10 |

[0436] The RT-qPCR reaction was performed using a QuantStudio (ThermoFisher) under the following fast cycling conditions. All samples and standards were analyzed at least in duplicate. In some instances, bulk room temperature (RT) step of 5-10 minutes was completed for all plates before proceeding with qPCR. The table below summarizes the PCR cycle:

| Step | # cycles | Temp. | Time |
|---|---|---|---|
| RT step | 1 | 50° C. | 5 min |
| RT inactivation/initial | 1 | 95° C. | 20 sec |
| denaturation | | | |
| Amplification | 40 | 95° C. | 3 sec |
| | | 60° C. | 30 sec |

[0437] The data analysis was performed by first determining the ΔCt vs the housekeeper gene. This ΔCt was then normalized against the DMSO control (ΔΔCt) and converted to RQ (relative quantification) using the 2\hat{ }(−ΔΔCt) equation. The RQ were then converted to a percentage response by arbitrarily setting an assay window of 3.5 and 4.0 ΔCt for HTT-CJ and MYB-CJ respectively and an assay window of 9 and 3 ΔCt for HTT-AJ and MYB-AJ in 96 well format (50,000 K562 cells/well and 15,000 A673 cells per well) and an assay window of 3 and 4 ΔCt for HTT-CJ and MYB-CJ respectively and an assay window of 5 and 3 ΔCt for HTT-AJ and MYB-AJ respectively in 384 well format (8,000 K562 cells/well example). These assay windows correspond to the maximal modulation observed at high concentration of the most active compounds. The percentage response was then fitted to the 4 parametric logistic equation to evaluate the concentration dependence of compound treatment. The increase in AJ mRNA is reported as AC₅₀ (compound concentration having 50% response in AJ increase) while the decrease in CJ mRNA levels is reported as IC₅₀ (compound concentration having 50% response in CJ decrease).

[0438] A summary of these results is illustrated in Table 2, wherein “A” represents an AC₅₀/IC₅₀ of less than 100 nM; “B” represents an AC₅₀/IC₅₀ of between 100 nM and 1 μM; and “C” represents an AC₅₀/IC₅₀ of between 1 μM and 10 μM; and “D” represents an AC₅₀/IC₅₀ of greater than 10 μM.

TABLE 2
Modulation of RNA Splicing by Exemplary Compounds

| | HTT | HTT | MYB | MYB |
|---|---|---|---|---|
| Compound | CJ | AJ | CJ | AJ |
| No. | IC₅₀ | AC₅₀ | IC₅₀ | AC₅₀ |
| 103 | B | B | C | C |
| 104 | B | B | C | C |
| 105 | B | B | B | C |
| 107 | B | B | B | B |
| 108 | B | B | B | C |
| 109 | A | B | B | B |
| 110 | B | C | B | B |
| 113 | C | C | D | D |
| 114 | D | D | D | D |
| 115 | C | C | D | C |
| 117 | D | C | D | C |
| 119 | D | D | D | D |
| 120 | C | D | D | C |
| 121 | D | D | D | D |
| 122 | A | A | A | A |
| 123 | B | B | C | C |
| 124 | A | A | B | B |
| 125 | B | B | B | B |
| 126 | C | D | D | D |
| 127 | A | B | B | B |
| 129 | A | A | B | B |
| 130 | A | A | B | B |
| 132 | B | B | C | C |
| 133 | A | A | B | B |
| 134 | C | D | C | D |
| 135 | B | B | B | B |
| 136 | A | A | B | B |
| 137 | A | A | B | B |
| 138 | A | B | B | C |
| 139 | A | A | B | B |
| 140 | C | C | C | C |
| 141 | D | D | D | D |
| 143 | B | B | B | B |
| 144 | D | D | D | D |
| 145 | B | B | C | B |
| 146 | A | A | B | B |
| 147 | B | B | B | B |
| 148 | C | D | D | D |
| 149 | A | A | B | B |
| 150 | A | A | B | B |
| 151 | A | A | A | B |
| 152 | A | B | B | B |
| 153 | D | C | C | D |
| 154 | A | B | B | B |
| 155 | A | B | B | B |
| 156 | B | B | C | C |
| 157 | D | D | C | D |
| 158 | D | D | D | D |
| 159 | D | D | D | D |
| 160 | A | A | B | B |
| 161 | B | C | C | C |
| 162 | D | D | D | D |
| 163 | D | D | D | D |
| 164 | A | A | B | B |
| 165 | D | D | D | D |
| 166 | A | A | B | B |
| 167 | B | B | C | C |
| 168 | A | B | B | B |
| 171 | A | A | B | B |
| 172 | A | A | A | A |
| 173 | A | A | B | B |
| 174 | A | A | B | B |
| 175 | A | A | B | A |
| 176 | A | A | B | C |
| 177 | A | A | B | B |
| 180 | A | A | B | B |
| 183 | A | A | B | B |
| 186 | A | A | B | B |
| 189 | A | A | B | B |
| 192 | A | B | B | B |
| 196 | C | C | D | C |
| 197 | B | B | C | C |
| 198 | A | A | B | B |
| 201 | B | C | C | C |
| 204 | B | B | C | C |
| 205 | B | B | C | B |
| 206 | A | B | B | B |
| 207 | B | B | B | B |
| 208 | D | D | D | D |
| 211 | A | B | B | B |
| 212 | A | A | B | B |

[0439] Additional studies were carried out for a larger panel of genes using the protocol provided above. The junction between flanking upstream and downstream exons was used to design canonical junction qPCR assays. At least one of the forward primer, reverse primer or the CY5-labeled 5′ nuclease probe (with 3′ quencher such as ZEN/Iowa Black FQ) was designed to overlap with the exon junction to capture the CJ mRNA transcript. BLAST was used to confirm the specificity of the probeset and parameters such as melting temperature, GC content, amplicon size, and primer dimer formation are considered during their design. Data for the decrease in CJ mRNA levels for four exemplary genes (HTT, SMN2, MYB, and Target C) analyzed in this panel are reported as IC₅₀ (compound concentration having 50% response in CJ decrease).

[0440] A summary of the results from the panel is illustrated in Table 3, wherein “A” represents an IC₅₀ of less than 100 nM; “B” represents an IC₅₀ of between 100 nM and 1 μM; and “C” represents an IC₅₀ of between 1 μM and 10 μM; and “D” represents an IC₅₀ of greater than 10 μM.

TABLE 3
Modulation of RNA Splicing by Exemplary Compounds

| | Target C | HTT | MYB | SMN2 |
|---|---|---|---|---|
| Compound | CJ | CJ | CJ | CJ |
| No. | IC₅₀ | IC₅₀ | IC₅₀ | IC₅₀ |
| 103 | C | B | C | B |
| 104 | C | B | C | A |
| 105 | B | B | B | A |
| 107 | B | B | B | A |
| 108 | C | B | B | B |
| 109 | B | A | B | A |
| 110 | C | B | B | A |
| 113 | D | C | D | C |
| 114 | D | D | D | C |
| 115 | C | C | D | B |
| 117 | D | D | D | B |
| 119 | D | D | D | C |
| 120 | D | C | D | B |
| 121 | D | D | D | C |
| 122 | A | A | A | A |
| 123 | C | B | C | B |
| 124 | B | A | B | A |
| 125 | B | B | B | A |
| 126 | C | C | D | C |
| 127 | B | A | B | A |
| 129 | B | A | B | A |
| 130 | B | A | B | A |
| 132 | C | B | C | B |
| 133 | B | A | B | A |
| 134 | D | C | C | B |
| 135 | B | B | B | A |
| 136 | B | A | B | A |
| 137 | B | A | B | A |
| 138 | B | A | B | A |
| 139 | B | A | B | A |
| 140 | C | C | C | B |
| 141 | D | D | D | C |
| 143 | B | B | B | A |
| 144 | D | D | D | C |
| 145 | B | B | C | A |
| 146 | B | A | B | A |
| 147 | B | B | B | B |
| 148 | D | C | D | C |
| 149 | A | A | B | A |
| 150 | B | A | B | A |
| 151 | A | A | A | A |
| 152 | B | A | B | A |
| 153 | D | D | C | D |
| 154 | B | A | B | A |
| 155 | B | A | B | A |
| 156 | C | B | C | B |
| 157 | D | D | C | C |
| 158 | D | D | D | C |
| 159 | D | D | D | D |
| 160 | B | A | B | A |
| 161 | C | B | C | B |
| 162 | D | D | D | C |
| 163 | D | D | D | C |
| 164 | B | A | B | A |
| 165 | D | D | D | D |
| 166 | B | A | B | A |
| 167 | B | B | C | A |
| 168 | B | A | B | A |
| 171 | A | A | B | A |
| 172 | A | A | A | A |
| 173 | B | A | B | A |
| 174 | A | A | B | A |
| 175 | A | A | B | — |
| 176 | B | A | B | — |
| 177 | A | A | B | A |
| 180 | B | A | B | A |
| 183 | A | A | B | A |
| 186 | A | A | B | A |
| 189 | B | A | B | A |
| 192 | B | A | B | A |
| 196 | D | C | D | B |
| 197 | C | B | C | B |
| 198 | A | A | B | A |
| 201 | C | B | C | B |
| 204 | B | B | C | B |
| 205 | C | B | C | B |
| 206 | B | A | B | B |
| 207 | C | B | B | A |
| 208 | D | D | D | C |
| 211 | — | A | B | A |
| 212 | B | A | B | A |

### Example 83: Investigating Effect of Exemplary Compounds on Cell Viability

[0441] Compounds described herein were screened for toxicity in K562 (human chronic myelogenous leukemia) and SH-SY5Y (human neuroblastoma) cells using a Cell Titer Glo 2.0 assay.

### Materials

[0442] Promega CellTiter-Glo® 2.0 Cell Viability Assay (cat #G9241)
[0443] Corning 384-well TC-treated microplates (cat #3570)

### Description

[0444] Cells were plated at 500 cells/well (K562 cells) in 45 μL of IMDM supplemented with 10% FBS in a 384-well opaque plate. Wells containing only medium were used as a blank control. Test compounds (e.g., compounds of Formula (I), (II), or (III)) were first serially diluted in DMSO then diluted 1:100 with IMDM+10% FBS. The final concentration of DMSO was 0.1% in each well. The cells were incubated for 72 hours at 37° C. and 5% CO₂ before assaying with Cell Titer Glo 2.0 reagent.

[0445] A summary of the results for viability is illustrated in Table 4, wherein A represents <100 nM; B represents 100-1000 nM; C represents 1000-9999 nM; and D represents greater than 10 μM in K562 cells.

TABLE 4
Effect of Exemplary Compounds on Cell Viability

| | K562 |
|---|---|
| Compound No. | GI₅₀ (nM) |
| 103 | C |
| 104 | C |
| 105 | B |
| 107 | B |
| 108 | B |
| 109 | B |
| 110 | C |
| 113 | C |
| 114 | D |
| 115 | C |
| 117 | C |
| 119 | D |
| 120 | C |
| 121 | C |
| 122 | A |
| 123 | C |
| 124 | B |
| 125 | B |
| 126 | D |
| 127 | B |
| 129 | B |
| 130 | B |
| 132 | C |
| 133 | B |
| 134 | C |
| 135 | B |
| 136 | B |
| 137 | B |
| 138 | C |
| 140 | D |
| 143 | B |
| 144 | C |
| 145 | C |
| 146 | B |
| 147 | B |
| 148 | D |
| 149 | A |
| 154 | B |
| 155 | B |
| 156 | C |
| 157 | D |
| 158 | C |
| 159 | D |
| 160 | B |
| 161 | C |
| 162 | C |
| 163 | C |
| 164 | B |
| 165 | D |
| 166 | C |
| 167 | C |
| 168 | B |
| 171 | B |
| 172 | B |
| 173 | B |
| 174 | B |
| 175 | B |
| 176 | B |
| 177 | B |
| 180 | B |
| 183 | B |
| 186 | B |
| 189 | B |
| 192 | B |
| 196 | D |
| 197 | C |
| 198 | B |
| 201 | C |
| 204 | C |
| 205 | C |
| 206 | B |
| 212 | B |

### Example 84: Evaluating Effect of Exemplary Compounds on Protein Abundance

[0446] Compounds described herein were used to screen for effects on quantitative protein abundance using a HiBit assay system (Promega). Quantitative protein abundance was determined by measuring the protein levels of HiBit-tagged protein targets expressed in cell culture via luminescence using the Nano-Glo HiBiT Lytic Detection System, which uses a split complementation assay format to reconstitute NanoBiT enzyme to generate a luminescent signal. A protein abundance assay was developed such that endogenous protein targets could be modified with the HiBiT peptide tag and their abundance could be assessed after compound treatment. Briefly, K562 cell lines containing a HiBiT-modification were treated with various compounds described herein (e.g., compounds of Formulas (I), (II), or (III)). After treatment for 24 hours, the protein abundance of a specific target was determined by measuring luminescence.

### Materials

[0447] Promega Nano-Glo HiBiT Lytic Detection System (cat #N3030)
[0448] Corning 384-well TC-treated microplates (cat #3570)
[0449] Synthego Engineered Cells Knock-In Clones

TABLE 5
Design of genetically modified HiBiT cell lines

| | | | Guide | Guide | |
|---|---|---|---|---|---|
| Cell | | Modifi- | RNA | RNA cut | Donor |
| Line | Gene | cation | Sequence | location | Sequence |
| K562 | MYB | HIBIT | GCGCCA | chr6: | CGGTG |
| | | | TGGCCC | 135,181,526 | CGGTC |
| | | | GAAGAC | | CCCGC |
| | | | CC | | GGCTC |
| | | | | | TCGGC |
| | | | | | GGAGC |
| | | | | | CCCGC |
| | | | | | GCCCG |
| | | | | | CCGCG |
| | | | | | CCATG |
| | | | | | gtgag |
| | | | | | cggct |
| | | | | | ggcgg |
| | | | | | ctgtt |
| | | | | | caaga |
| | | | | | agatt |
| | | | | | agcGG |
| | | | | | CAGCT |
| | | | | | CCGGA |
| | | | | | GGATC |
| | | | | | TAGCG |
| | | | | | GCGCC |
| | | | | | CGAAG |
| | | | | | ACCCC |
| | | | | | GGCAC |
| | | | | | AGgta |
| | | | | | acggg |
| | | | | | gagcc |
| | | | | | ggggg |
| | | | | | gcggc |
| | | | | | cgagg |
| | | | | | g |
| K562 | HTT | HIBIT | CAGCTTT | chr4: | CGAGT |
| | | | TCCAGG | 3,074,830 | CGGCC |
| | | | GTCGCC | | CGAGG |
| | | | A | | CCTCC |
| | | | | | GGGGA |
| | | | | | CTGCC |
| | | | | | GTGCC |
| | | | | | GGGCG |
| | | | | | GGAGA |
| | | | | | CCGCC |
| | | | | | ATGgt |
| | | | | | gagcg |
| | | | | | gctgg |
| | | | | | cggct |
| | | | | | gttca |
| | | | | | agaag |
| | | | | | attag |
| | | | | | cGGCA |
| | | | | | GCTCC |
| | | | | | GGAGG |
| | | | | | ATCTA |
| | | | | | GCGGC |
| | | | | | GCGAC |
| | | | | | CCTGG |
| | | | | | AAAAG |
| | | | | | CTGAT |
| | | | | | GAAGG |
| | | | | | CCTTC |
| | | | | | GAGTC |
| | | | | | CCTCA |
| | | | | | AGTCC |
| | | | | | TTCCA |

### Description

[0450] Cells were maintained in IMDM with 10% FBS. Before the assay, cells were diluted with phenolphthalein-free growth media (IMDM+1% FBS media) and were seeded in a 384-well plate at a density of 10000 cells/well (for each cell line listed in Table 6). Each compound was prepared as a 10-point 3-fold serial dilution in DMSO with the top dose at a final concentration of 10 μM in the well. Unmodified K562 cells were added at the previously specified density with DMSO to serve as an assay baseline and positive control (PC) and DMSO only with the respective modified cell lines was added to the negative control (NC) columns. Final DMSO concentration was kept at or below 0.25%. Treated cell plates were placed in an incubator at 37° C. with 5% CO₂ for 24 hours. After 24 hours, 25 μL of Complete HiBit Lytic reagent was added to each well at room temperature (e.g. one plate requiring 10 mL Lytic Buffer, 100 μL LgBiT Protein, 200 μL Lytic Substrate), shaken for 5 minutes at 600 RPM, then left to sit for 10 minutes for signal to stabilize before reading on a Spark Cyto plate reader (Tecan) with a 500 ms measurement time.

[0451] To determine compound effects on protein abundance of each target in Table 6, the percent response for each respective cell line was calculated at each compound concentration as follows:

$$\% response = 100 * ( S - PC ) / ( NC - PC )$$

For the normalized response at each concentration, a four-parameter logistical regression was fit to the data and the response was interpolated at the 50% value to determine a concentration for protein abundance at 50% (IC₅₀) the untreated control.

[0452] A summary of the results for protein abundance is illustrated in Table 6, wherein A represents <100 nM; B represents 100-1000 nM; C represents 1000-9999 nM; and D represents greater than 10 μM.

TABLE 6
Effect of Exemplary Compounds on Protein Abundance

| Compound | | | |
|---|---|---|---|
| No. | MYB | Target C | HTT |
| 103 | C | B | B |
| 104 | B | B | B |
| 105 | B | B | B |
| 107 | B | B | B |
| 108 | B | B | B |
| 109 | B | A | A |
| 110 | B | B | B |
| 113 | C | C | C |
| 114 | D | D | D |
| 115 | C | C | C |
| 117 | C | D | C |
| 119 | C | D | D |
| 120 | C | D | C |
| 121 | D | D | D |
| 122 | A | A | A |
| 123 | C | B | B |
| 124 | B | A | A |
| 125 | B | A | A |
| 126 | D | C | C |
| 127 | B | A | A |
| 129 | B | A | A |
| 130 | B | A | A |
| 132 | C | B | B |
| 133 | B | A | A |
| 134 | C | C | C |
| 135 | B | B | A |
| 136 | B | A | A |
| 137 | B | A | A |
| 138 | B | B | B |
| 139 | B | B | B |
| 140 | C | C | C |
| 141 | D | D | D |
| 143 | B | B | B |
| 144 | C | C | C |
| 145 | B | B | B |
| 146 | B | A | A |
| 147 | B | B | B |
| 148 | D | D | C |
| 149 | B | A | A |
| 150 | B | A | A |
| 151 | A | A | A |
| 152 | B | B | A |
| 153 | C | C | C |
| 154 | B | A | A |
| 155 | B | B | A |
| 156 | C | C | B |
| 157 | C | D | C |
| 158 | C | C | C |
| 159 | D | D | D |
| 160 | B | A | A |
| 161 | C | C | B |
| 162 | C | C | C |
| 163 | C | C | C |
| 164 | B | A | A |
| 165 | D | D | D |
| 166 | B | B | A |
| 167 | C | B | B |
| 168 | B | B | A |
| 171 | B | A | A |
| 172 | A | A | A |
| 173 | B | A | A |
| 174 | B | A | A |
| 177 | B | A | A |
| 180 | B | A | A |
| 183 | B | A | A |
| 186 | B | A | A |
| 189 | B | A | A |
| 192 | B | B | A |
| 212 | B | A | A |

### EQUIVALENTS AND SCOPE

[0453] This application refers to various issued patents, published patent applications, journal articles, and other publications, all of which are incorporated herein by reference. If there is a conflict between any of the incorporated references and the instant specification, the specification shall control. In addition, any particular embodiment of the present invention that falls within the prior art may be explicitly excluded from any one or more of the claims. Because such embodiments are deemed to be known to one of ordinary skill in the art, they may be excluded even if the exclusion is not set forth explicitly herein. Any particular embodiment of the invention can be excluded from any claim, for any reason, whether or not related to the existence of prior art.

[0454] Those skilled in the art will recognize or be able to ascertain using no more than routine experimentation many equivalents to the specific embodiments described herein. The scope of the present embodiments described herein is not intended to be limited to the above Description, Figures, or Examples but rather is as set forth in the appended claims. Those of ordinary skill in the art will appreciate that various changes and modifications to this description may be made without departing from the spirit or scope of the present invention, as defined in the following claims.

The application's sequence listing, which the Patent Office published only in electronic form, follows.

SEQUENCE LISTING (5543 sequences)

SEQ ID NO: 1 - RNA, 10 nt, synthetic construct
  source 1..10: mol_type = other RNA
  misc_feature 1..10: note = Description of sequence: Splice site sequence
aaagcaagtt

SEQ ID NO: 2 - RNA, 10 nt, synthetic construct
  source 1..10: mol_type = other RNA
  misc_feature 1..10: note = Description of sequence: Splice site sequence
aaagtaaaaa

SEQ ID NO: 3 - RNA, 10 nt, synthetic construct
  source 1..10: mol_type = other RNA
  misc_feature 1..10: note = Description of sequence: Splice site sequence
aaagtaaaat

SEQ ID NO: 4 - RNA, 10 nt, synthetic construct
  source 1..10: mol_type = other RNA
  misc_feature 1..10: note = Description of sequence: Splice site sequence
aaagtaaagt

SEQ ID NO: 5 - RNA, 10 nt, synthetic construct
  source 1..10: mol_type = other RNA
  misc_feature 1..10: note = Description of sequence: Splice site sequence
aaagtaaata

SEQ ID NO: 6 - RNA, 10 nt, synthetic construct
  source 1..10: mol_type = other RNA
  misc_feature 1..10: note = Description of sequence: Splice site sequence
aaagtaaatg

SEQ ID NO: 7 - RNA, 10 nt, synthetic construct
  source 1..10: mol_type = other RNA
  misc_feature 1..10: note = Description of sequence: Splice site sequence
aaagtaaatt

SEQ ID NO: 8 - RNA, 10 nt, synthetic construct
  source 1..10: mol_type = other RNA
  misc_feature 1..10: note = Description of sequence: Splice site sequence
aaagtaacac

SEQ ID NO: 9 - RNA, 10 nt, synthetic construct
  source 1..10: mol_type = other RNA
  misc_feature 1..10: note = Description of sequence: Splice site sequence
aaagtaacca

SEQ ID NO: 10 - RNA, 10 nt, synthetic construct
  source 1..10: mol_type = other RNA
  misc_feature 1..10: note = Description of sequence: Splice site sequence
aaagtaactt

SEQ ID NO: 11 - RNA, 10 nt, synthetic construct
  source 1..10: mol_type = other RNA
  misc_feature 1..10: note = Description of sequence: Splice site sequence
aaagtaagaa

SEQ ID NO: 12 - RNA, 10 nt, synthetic construct
  source 1..10: mol_type = other RNA
  misc_feature 1..10: note = Description of sequence: Splice site sequence
aaagtaagac

SEQ ID NO: 13 - RNA, 10 nt, synthetic construct
  source 1..10: mol_type = other RNA
  misc_feature 1..10: note = Description of sequence: Splice site sequence
aaagtaagag

SEQ ID NO: 14 - RNA, 10 nt, synthetic construct
  source 1..10: mol_type = other RNA
  misc_feature 1..10: note = Description of sequence: Splice site sequence
aaagtaagat

SEQ ID NO: 15 - RNA, 10 nt, synthetic construct
  source 1..10: mol_type = other RNA
  misc_feature 1..10: note = Description of sequence: Splice site sequence
aaagtaagca

SEQ ID NO: 16 - RNA, 10 nt, synthetic construct
  source 1..10: mol_type = other RNA
  misc_feature 1..10: note = Description of sequence: Splice site sequence
aaagtaagcc

SEQ ID NO: 17 - RNA, 10 nt, synthetic construct
  source 1..10: mol_type = other RNA
  misc_feature 1..10: note = Description of sequence: Splice site sequence
aaagtaagct

SEQ ID NO: 18 - RNA, 10 nt, synthetic construct
  source 1..10: mol_type = other RNA
  misc_feature 1..10: note = Description of sequence: Splice site sequence
aaagtaagga

SEQ ID NO: 19 - RNA, 10 nt, synthetic construct
  source 1..10: mol_type = other RNA
  misc_feature 1..10: note = Description of sequence: Splice site sequence
aaagtaaggg

SEQ ID NO: 20 - RNA, 10 nt, synthetic construct
  source 1..10: mol_type = other RNA
  misc_feature 1..10: note = Description of sequence: Splice site sequence
aaagtaaggt

SEQ ID NO: 21 - RNA, 10 nt, synthetic construct
  source 1..10: mol_type = other RNA
  misc_feature 1..10: note = Description of sequence: Splice site sequence
aaagtaagta

SEQ ID NO: 22 - RNA, 10 nt, synthetic construct
  source 1..10: mol_type = other RNA
  misc_feature 1..10: note = Description of sequence: Splice site sequence
aaagtaagtc

SEQ ID NO: 23 - RNA, 10 nt, synthetic construct
  source 1..10: mol_type = other RNA
  misc_feature 1..10: note = Description of sequence: Splice site sequence
aaagtaagtg

SEQ ID NO: 24 - RNA, 10 nt, synthetic construct
  source 1..10: mol_type = other RNA
  misc_feature 1..10: note = Description of sequence: Splice site sequence
aaagtaagtt

SEQ ID NO: 25 - RNA, 10 nt, synthetic construct
  source 1..10: mol_type = other RNA
  misc_feature 1..10: note = Description of sequence: Splice site sequence
aaagtaatct

SEQ ID NO: 26 - RNA, 10 nt, synthetic construct
  source 1..10: mol_type = other RNA
  misc_feature 1..10: note = Description of sequence: Splice site sequence
aaagtaatta

SEQ ID NO: 27 - RNA, 10 nt, synthetic construct
  source 1..10: mol_type = other RNA
  misc_feature 1..10: note = Description of sequence: Splice site sequence
aaagtacaaa

SEQ ID NO: 28 - RNA, 10 nt, synthetic construct
  source 1..10: mol_type = other RNA
  misc_feature 1..10: note = Description of sequence: Splice site sequence
aaagtaccgg

SEQ ID NO: 29 - RNA, 10 nt, synthetic construct
  source 1..10: mol_type = other RNA
  misc_feature 1..10: note = Description of sequence: Splice site sequence
aaagtactag

SEQ ID NO: 30 - RNA, 10 nt, synthetic construct
  source 1..10: mol_type = other RNA
  misc_feature 1..10: note = Description of sequence: Splice site sequence
aaagtactgg

SEQ ID NO: 31 - RNA, 10 nt, synthetic construct
  source 1..10: mol_type = other RNA
  misc_feature 1..10: note = Description of sequence: Splice site sequence
aaagtacttc

SEQ ID NO: 32 - RNA, 10 nt, synthetic construct
  source 1..10: mol_type = other RNA
  misc_feature 1..10: note = Description of sequence: Splice site sequence
aaagtacttg

SEQ ID NO: 33 - RNA, 10 nt, synthetic construct
  source 1..10: mol_type = other RNA
  misc_feature 1..10: note = Description of sequence: Splice site sequence
aaagtagctt

SEQ ID NO: 34 - RNA, 10 nt, synthetic construct
  source 1..10: mol_type = other RNA
  misc_feature 1..10: note = Description of sequence: Splice site sequence
aaagtaggag

SEQ ID NO: 35 - RNA, 10 nt, synthetic construct
  source 1..10: mol_type = other RNA
  misc_feature 1..10: note = Description of sequence: Splice site sequence
aaagtaggat

SEQ ID NO: 36 - RNA, 10 nt, synthetic construct
  source 1..10: mol_type = other RNA
  misc_feature 1..10: note = Description of sequence: Splice site sequence
aaagtagggg

SEQ ID NO: 37 - RNA, 10 nt, synthetic construct
  source 1..10: mol_type = other RNA
  misc_feature 1..10: note = Description of sequence: Splice site sequence
aaagtaggta

SEQ ID NO: 38 - RNA, 10 nt, synthetic construct
  source 1..10: mol_type = other RNA
  misc_feature 1..10: note = Description of sequence: Splice site sequence
aaagtagtaa

SEQ ID NO: 39 - RNA, 10 nt, synthetic construct
  source 1..10: mol_type = other RNA
  misc_feature 1..10: note = Description of sequence: Splice site sequence
aaagtatatt

SEQ ID NO: 40 - RNA, 10 nt, synthetic construct
  source 1..10: mol_type = other RNA
  misc_feature 1..10: note = Description of sequence: Splice site sequence
aaagtatcct

SEQ ID NO: 41 - RNA, 10 nt, synthetic construct
  source 1..10: mol_type = other RNA
  misc_feature 1..10: note = Description of sequence: Splice site sequence
aaagtatctc

SEQ ID NO: 42 - RNA, 10 nt, synthetic construct
  source 1..10: mol_type = other RNA
  misc_feature 1..10: note = Description of sequence: Splice site sequence
aaagtatgga

SEQ ID NO: 43 - RNA, 10 nt, synthetic construct
  source 1..10: mol_type = other RNA
  misc_feature 1..10: note = Description of sequence: Splice site sequence
aaagtatgta

SEQ ID NO: 44 - RNA, 10 nt, synthetic construct
  source 1..10: mol_type = other RNA
  misc_feature 1..10: note = Description of sequence: Splice site sequence
aaagtatgtg

SEQ ID NO: 45 - RNA, 10 nt, synthetic construct
  source 1..10: mol_type = other RNA
  misc_feature 1..10: note = Description of sequence: Splice site sequence
aaagtatgtt

SEQ ID NO: 46 - RNA, 10 nt, synthetic construct
  source 1..10: mol_type = other RNA
  misc_feature 1..10: note = Description of sequence: Splice site sequence
aaagtattgg

SEQ ID NO: 47 - RNA, 10 nt, synthetic construct
  source 1..10: mol_type = other RNA
  misc_feature 1..10: note = Description of sequence: Splice site sequence
aaagtatttt

SEQ ID NO: 48 - RNA, 10 nt, synthetic construct
  source 1..10: mol_type = other RNA
  misc_feature 1..10: note = Description of sequence: Splice site sequence
aaagtcagat

SEQ ID NO: 49 - RNA, 10 nt, synthetic construct
  source 1..10: mol_type = other RNA
  misc_feature 1..10: note = Description of sequence: Splice site sequence
aaagtctgag

SEQ ID NO: 50 - RNA, 10 nt, synthetic construct
  source 1..10: mol_type = other RNA
  misc_feature 1..10: note = Description of sequence: Splice site sequence
aaagtgaata

SEQ ID NO: 51 - RNA, 10 nt, synthetic construct
  source 1..10: mol_type = other RNA
  misc_feature 1..10: note = Description of sequence: Splice site sequence
aaagtgagaa

SEQ ID NO: 52 - RNA, 10 nt, synthetic construct
  source 1..10: mol_type = other RNA
  misc_feature 1..10: note = Description of sequence: Splice site sequence
aaagtgagac

SEQ ID NO: 53 - RNA, 10 nt, synthetic construct
  source 1..10: mol_type = other RNA
  misc_feature 1..10: note = Description of sequence: Splice site sequence
aaagtgagag

SEQ ID NO: 54 - RNA, 10 nt, synthetic construct
  source 1..10: mol_type = other RNA
  misc_feature 1..10: note = Description of sequence: Splice site sequence
aaagtgagat

SEQ ID NO: 55 - RNA, 10 nt, synthetic construct
  source 1..10: mol_type = other RNA
  misc_feature 1..10: note = Description of sequence: Splice site sequence
aaagtgagca

SEQ ID NO: 56 - RNA, 10 nt, synthetic construct
  source 1..10: mol_type = other RNA
  misc_feature 1..10: note = Description of sequence: Splice site sequence
aaagtgagct

SEQ ID NO: 57 - RNA, 10 nt, synthetic construct
  source 1..10: mol_type = other RNA
  misc_feature 1..10: note = Description of sequence: Splice site sequence
aaagtgaggg

SEQ ID NO: 58 - RNA, 10 nt, synthetic construct
  source 1..10: mol_type = other RNA
  misc_feature 1..10: note = Description of sequence: Splice site sequence
aaagtgagta

SEQ ID NO: 59 - RNA, 10 nt, synthetic construct
  source 1..10: mol_type = other RNA
  misc_feature 1..10: note = Description of sequence: Splice site sequence
aaagtgagtc

SEQ ID NO: 60 - RNA, 10 nt, synthetic construct
  source 1..10: mol_type = other RNA
  misc_feature 1..10: note = Description of sequence: Splice site sequence
aaagtgagtg

SEQ ID NO: 61 - RNA, 10 nt, synthetic construct
  source 1..10: mol_type = other RNA
  misc_feature 1..10: note = Description of sequence: Splice site sequence
aaagtgagtt

SEQ ID NO: 62 - RNA, 10 nt, synthetic construct
  source 1..10: mol_type = other RNA
  misc_feature 1..10: note = Description of sequence: Splice site sequence
aaagtgcgtc

SEQ ID NO: 63 - RNA, 10 nt, synthetic construct
  source 1..10: mol_type = other RNA
  misc_feature 1..10: note = Description of sequence: Splice site sequence
aaagtgctga

SEQ ID NO: 64 - RNA, 10 nt, synthetic construct
  source 1..10: mol_type = other RNA
  misc_feature 1..10: note = Description of sequence: Splice site sequence
aaagtgggtc

SEQ ID NO: 65 - RNA, 10 nt, synthetic construct
  source 1..10: mol_type = other RNA
  misc_feature 1..10: note = Description of sequence: Splice site sequence
aaagtgggtt

SEQ ID NO: 66 - RNA, 10 nt, synthetic construct
  source 1..10: mol_type = other RNA
  misc_feature 1..10: note = Description of sequence: Splice site sequence
aaagtggtaa

SEQ ID NO: 67 - RNA, 10 nt, synthetic construct
  source 1..10: mol_type = other RNA
  misc_feature 1..10: note = Description of sequence: Splice site sequence
aaagtgtatg

SEQ ID NO: 68 - RNA, 10 nt, synthetic construct
  source 1..10: mol_type = other RNA
  misc_feature 1..10: note = Description of sequence: Splice site sequence
aaagtgtgtg

SEQ ID NO: 69 - RNA, 10 nt, synthetic construct
  source 1..10: mol_type = other RNA
  misc_feature 1..10: note = Description of sequence: Splice site sequence
aaagtgtgtt

SEQ ID NO: 70 - RNA, 10 nt, synthetic construct
  source 1..10: mol_type = other RNA
  misc_feature 1..10: note = Description of sequence: Splice site sequence
aaagttaagt

SEQ ID NO: 71 - RNA, 10 nt, synthetic construct
  source 1..10: mol_type = other RNA
  misc_feature 1..10: note = Description of sequence: Splice site sequence
aaagttactt

SEQ ID NO: 72 - RNA, 10 nt, synthetic construct
  source 1..10: mol_type = other RNA
  misc_feature 1..10: note = Description of sequence: Splice site sequence
aaagttagtg

SEQ ID NO: 73 - RNA, 10 nt, synthetic construct
  source 1..10: mol_type = other RNA
  misc_feature 1..10: note = Description of sequence: Splice site sequence
aaagttatgt

SEQ ID NO: 74 - RNA, 10 nt, synthetic construct
  source 1..10: mol_type = other RNA
  misc_feature 1..10: note = Description of sequence: Splice site sequence
aaagttgagt

SEQ ID NO: 75 - RNA, 10 nt, synthetic construct
  source 1..10: mol_type = other RNA
  misc_feature 1..10: note = Description of sequence: Splice site sequence
aaagtttgta

SEQ ID NO: 76 - RNA, 10 nt, synthetic construct
  source 1..10: mol_type = other RNA
  misc_feature 1..10: note = Description of sequence: Splice site sequence
aacgtaaaac

SEQ ID NO: 77 - RNA, 10 nt, synthetic construct
  source 1..10: mol_type = other RNA
  misc_feature 1..10: note = Description of sequence: Splice site sequence
aacgtaaagc

SEQ ID NO: 78 - RNA, 10 nt, synthetic construct
  source 1..10: mol_type = other RNA
  misc_feature 1..10: note = Description of sequence: Splice site sequence
aacgtaaagg

SEQ ID NO: 79 - RNA, 10 nt, synthetic construct
  source 1..10: mol_type = other RNA
  misc_feature 1..10: note = Description of sequence: Splice site sequence
aacgtaagca

SEQ ID NO: 80 - RNA, 10 nt, synthetic construct
  source 1..10: mol_type = other RNA
  misc_feature 1..10: note = Description of sequence: Splice site sequence
aacgtaaggg

SEQ ID NO: 81 - RNA, 10 nt, synthetic construct
  source 1..10: mol_type = other RNA
  misc_feature 1..10: note = Description of sequence: Splice site sequence
aacgtaagtc

SEQ ID NO: 82 - RNA, 10 nt, synthetic construct
  source 1..10: mol_type = other RNA
  misc_feature 1..10: note = Description of sequence: Splice site sequence
aacgtaagtg

SEQ ID NO: 83 - RNA, 10 nt, synthetic construct
  source 1..10: mol_type = other RNA
  misc_feature 1..10: note = Description of sequence: Splice site sequence
aacgtaatgg

SEQ ID NO: 84 - RNA, 10 nt, synthetic construct
  source 1..10: mol_type = other RNA
  misc_feature 1..10: note = Description of sequence: Splice site sequence
aacgtagtga

SEQ ID NO: 85 - RNA, 10 nt, synthetic construct
  source 1..10: mol_type = other RNA
  misc_feature 1..10: note = Description of sequence: Splice site sequence
aacgtatgta

SEQ ID NO: 86 - RNA, 10 nt, synthetic construct
  source 1..10: mol_type = other RNA
  misc_feature 1..10: note = Description of sequence: Splice site sequence
aacgtatgtt

SEQ ID NO: 87 - RNA, 10 nt, synthetic construct
  source 1..10: mol_type = other RNA
  misc_feature 1..10: note = Description of sequence: Splice site sequence
aacgtgagca

SEQ ID NO: 88 - RNA, 10 nt, synthetic construct
  source 1..10: mol_type = other RNA
  misc_feature 1..10: note = Description of sequence: Splice site sequence
aacgtgagga

SEQ ID NO: 89 - RNA, 10 nt, synthetic construct
  source 1..10: mol_type = other RNA
  misc_feature 1..10: note = Description of sequence: Splice site sequence
aacgtgattt

SEQ ID NO: 90 - RNA, 10 nt, synthetic construct
  source 1..10: mol_type = other RNA
  misc_feature 1..10: note = Description of sequence: Splice site sequence
aacgtgggat

SEQ ID NO: 91 - RNA, 10 nt, synthetic construct
  source 1..10: mol_type = other RNA
  misc_feature 1..10: note = Description of sequence: Splice site sequence
aacgtgggta

SEQ ID NO: 92 - RNA, 10 nt, synthetic construct
  source 1..10: mol_type = other RNA
  misc_feature 1..10: note = Description of sequence: Splice site sequence
aacgtgtgtt

SEQ ID NO: 93 - RNA, 10 nt, synthetic construct
  source 1..10: mol_type = other RNA
  misc_feature 1..10: note = Description of sequence: Splice site sequence
aacgttggta

SEQ ID NO: 94 - RNA, 10 nt, synthetic construct
  source 1..10: mol_type = other RNA
  misc_feature 1..10: note = Description of sequence: Splice site sequence
aaggcaaatt

SEQ ID NO: 95 - RNA, 10 nt, synthetic construct
  source 1..10: mol_type = other RNA
  misc_feature 1..10: note = Description of sequence: Splice site sequence
aaggcaagag

SEQ ID NO: 96 - RNA, 10 nt, synthetic construct
  source 1..10: mol_type = other RNA
  misc_feature 1..10: note = Description of sequence: Splice site sequence
aaggcaagat

SEQ ID NO: 97 - RNA, 10 nt, synthetic construct
  source 1..10: mol_type = other RNA
  misc_feature 1..10: note = Description of sequence: Splice site sequence
aaggcaagcc

SEQ ID NO: 98 - RNA, 10 nt, synthetic construct
  source 1..10: mol_type = other RNA
  misc_feature 1..10: note = Description of sequence: Splice site sequence
aaggcaagga

SEQ ID NO: 99 - RNA, 10 nt, synthetic construct
  source 1..10: mol_type = other RNA
  misc_feature 1..10: note = Description of sequence: Splice site sequence
aaggcaaggg

SEQ ID NO: 100 - RNA, 10 nt, synthetic construct
  source 1..10: mol_type = other RNA
  misc_feature 1..10: note = Description of sequence: Splice site sequence
aaggcaagtg

SEQ ID NO: 101 - RNA, 10 nt, synthetic construct
  source 1..10: mol_type = other RNA
  misc_feature 1..10: note = Description of sequence: Splice site sequence
aaggcaagtt

SEQ ID NO: 102 - RNA, 10 nt, synthetic construct
  source 1..10: mol_type = other RNA
  misc_feature 1..10: note = Description of sequence: Splice site sequence
aaggcactgc

SEQ ID NO: 103 - RNA, 10 nt, synthetic construct
  source 1..10: mol_type = other RNA
  misc_feature 1..10: note = Description of sequence: Splice site sequence
aaggcagaaa

SEQ ID NO: 104 - RNA, 10 nt, synthetic construct
  source 1..10: mol_type = other RNA
  misc_feature 1..10: note = Description of sequence: Splice site sequence
aaggcaggat

SEQ ID NO: 105 - RNA, 10 nt, synthetic construct
  source 1..10: mol_type = other RNA
  misc_feature 1..10: note = Description of sequence: Splice site sequence
aaggcaggca

SEQ ID NO: 106 - RNA, 10 nt, synthetic construct
  source 1..10: mol_type = other RNA
  misc_feature 1..10: note = Description of sequence: Splice site sequence
aaggcaggga

SEQ ID NO: 107 - RNA, 10 nt, synthetic construct
  source 1..10: mol_type = other RNA
  misc_feature 1..10: note = Description of sequence: Splice site sequence
aaggcagggg

SEQ ID NO: 108 - RNA, 10 nt, synthetic construct
  source 1..10: mol_type = other RNA
  misc_feature 1..10: note = Description of sequence: Splice site sequence
aaggcaggta

SEQ ID NO: 109 - RNA, 10 nt, synthetic construct
  source 1..10: mol_type = other RNA
  misc_feature 1..10: note = Description of sequence: Splice site sequence
aaggcaggtg

SEQ ID NO: 110 - RNA, 10 nt, synthetic construct
  source 1..10: mol_type = other RNA
  misc_feature 1..10: note = Description of sequence: Splice site sequence
aaggcatctc

SEQ ID NO: 111 - RNA, 10 nt, synthetic construct
  source 1..10: mol_type = other RNA
  misc_feature 1..10: note = Description of sequence: Splice site sequence
aaggcatgct

SEQ ID NO: 112 - RNA, 10 nt, synthetic construct
  source 1..10: mol_type = other RNA
  misc_feature 1..10: note = Description of sequence: Splice site sequence
aaggcatgga

SEQ ID NO: 113 - RNA, 10 nt, synthetic construct
  source 1..10: mol_type = other RNA
  misc_feature 1..10: note = Description of sequence: Splice site sequence
aaggcatgtt

SEQ ID NO: 114 - RNA, 10 nt, synthetic construct
  source 1..10: mol_type = other RNA
  misc_feature 1..10: note = Description of sequence: Splice site sequence
aaggcattat

SEQ ID NO: 115 - RNA, 10 nt, synthetic construct
  source 1..10: mol_type = other RNA
  misc_feature 1..10: note = Description of sequence: Splice site sequence
aaggcgagct

SEQ ID NO: 116 - RNA, 10 nt, synthetic construct
  source 1..10: mol_type = other RNA
  misc_feature 1..10: note = Description of sequence: Splice site sequence
aaggcgagtc

SEQ ID NO: 117 - RNA, 10 nt, synthetic construct
  source 1..10: mol_type = other RNA
  misc_feature 1..10: note = Description of sequence: Splice site sequence
aaggcgagtt

SEQ ID NO: 118 - RNA, 10 nt, synthetic construct
  source 1..10: mol_type = other RNA
  misc_feature 1..10: note = Description of sequence: Splice site sequence
aaggctagcc

SEQ ID NO: 119 - RNA, 10 nt, synthetic construct
  source 1..10: mol_type = other RNA
  misc_feature 1..10: note = Description of sequence: Splice site sequence
aaggtaaaaa

SEQ ID NO: 120 - RNA, 10 nt, synthetic construct
  source 1..10: mol_type = other RNA
  misc_feature 1..10: note = Description of sequence: Splice site sequence
aaggtaaaac

SEQ ID NO: 121 - RNA, 10 nt, synthetic construct
  source 1..10: mol_type = other RNA
  misc_feature 1..10: note = Description of sequence: Splice site sequence
aaggtaaaag

SEQ ID NO: 122 - RNA, 10 nt, synthetic construct
  source 1..10: mol_type = other RNA
  misc_feature 1..10: note = Description of sequence: Splice site sequence
aaggtaaaat

SEQ ID NO: 123 - RNA, 10 nt, synthetic construct
  source 1..10: mol_type = other RNA
  misc_feature 1..10: note = Description of sequence: Splice site sequence
aaggtaaaca

SEQ ID NO: 124 - RNA, 10 nt, synthetic construct
  source 1..10: mol_type = other RNA
  misc_feature 1..10: note = Description of sequence: Splice site sequence
aaggtaaacc

SEQ ID NO: 125 - RNA, 10 nt, synthetic construct
  source 1..10: mol_type = other RNA
  misc_feature 1..10: note = Description of sequence: Splice site sequence
aaggtaaact

SEQ ID NO: 126 - RNA, 10 nt, synthetic construct
  source 1..10: mol_type = other RNA
  misc_feature 1..10: note = Description of sequence: Splice site sequence
aaggtaaaga

SEQ ID NO: 127 - RNA, 10 nt, synthetic construct
  source 1..10: mol_type = other RNA
  misc_feature 1..10: note = Description of sequence: Splice site sequence
aaggtaaagc

SEQ ID NO: 128 - RNA, 10 nt, synthetic construct
  source 1..10: mol_type = other RNA
  misc_feature 1..10: note = Description of sequence: Splice site sequence
aaggtaaagg

SEQ ID NO: 129 - RNA, 10 nt, synthetic construct
  source 1..10: mol_type = other RNA
  misc_feature 1..10: note = Description of sequence: Splice site sequence
aaggtaaagt

SEQ ID NO: 130 - RNA, 10 nt, synthetic construct
  source 1..10: mol_type = other RNA
  misc_feature 1..10: note = Description of sequence: Splice site sequence
aaggtaaata

SEQ ID NO: 131 - RNA, 10 nt, synthetic construct
  source 1..10: mol_type = other RNA
  misc_feature 1..10: note = Description of sequence: Splice site sequence
aaggtaaatc

SEQ ID NO: 132 - RNA, 10 nt, synthetic construct
  source 1..10: mol_type = other RNA
  misc_feature 1..10: note = Description of sequence: Splice site sequence
aaggtaaatg

SEQ ID NO: 133 - RNA, 10 nt, synthetic construct
  source 1..10: mol_type = other RNA
  misc_feature 1..10: note = Description of sequence: Splice site sequence
aaggtaaatt

SEQ ID NO: 134 - RNA, 10 nt, synthetic construct
  source 1..10: mol_type = other RNA
  misc_feature 1..10: note = Description of sequence: Splice site sequence
aaggtaacaa

SEQ ID NO: 135 - RNA, 10 nt, synthetic construct
  source 1..10: mol_type = other RNA
  misc_feature 1..10: note = Description of sequence: Splice site sequence
aaggtaacat

SEQ ID NO: 136 - RNA, 10 nt, synthetic construct
  source 1..10: mol_type = other RNA
  misc_feature 1..10: note = Description of sequence: Splice site sequence
aaggtaaccc

SEQ ID NO: 137 - RNA, 10 nt, synthetic construct
  source 1..10: mol_type = other RNA
  misc_feature 1..10: note = Description of sequence: Splice site sequence
aaggtaacta

SEQ ID NO: 138 - RNA, 10 nt, synthetic construct
  source 1..10: mol_type = other RNA
  misc_feature 1..10: note = Description of sequence: Splice site sequence
aaggtaactc

SEQ ID NO: 139 - RNA, 10 nt, synthetic construct
  source 1..10: mol_type = other RNA
  misc_feature 1..10: note = Description of sequence: Splice site sequence
aaggtaactg

SEQ ID NO: 140 - RNA, 10 nt, synthetic construct
  source 1..10: mol_type = other RNA
  misc_feature 1..10: note = Description of sequence: Splice site sequence
aaggtaactt

SEQ ID NO: 141 - RNA, 10 nt, synthetic construct
  source 1..10: mol_type = other RNA
  misc_feature 1..10: note = Description of sequence: Splice site sequence
aaggtaagaa

SEQ ID NO: 142 - RNA, 10 nt, synthetic construct
  source 1..10: mol_type = other RNA
  misc_feature 1..10: note = Description of sequence: Splice site sequence
aaggtaagac

SEQ ID NO: 143 - RNA, 10 nt, synthetic construct
  source 1..10: mol_type = other RNA
  misc_feature 1..10: note = Description of sequence: Splice site sequence
aaggtaagag

SEQ ID NO: 144 - RNA, 10 nt, synthetic construct
  source 1..10: mol_type = other RNA
  misc_feature 1..10: note = Description of sequence: Splice site sequence
aaggtaagat

SEQ ID NO: 145 - RNA, 10 nt, synthetic construct
  source 1..10: mol_type = other RNA
  misc_feature 1..10: note = Description of sequence: Splice site sequence
aaggtaagca

SEQ ID NO: 146 - RNA, 10 nt, synthetic construct
  source 1..10: mol_type = other RNA
  misc_feature 1..10: note = Description of sequence: Splice site sequence
aaggtaagcc

SEQ ID NO: 147 - RNA, 10 nt, synthetic construct
  source 1..10: mol_type = other RNA
  misc_feature 1..10: note = Description of sequence: Splice site sequence
aaggtaagcg

SEQ ID NO: 148 - RNA, 10 nt, synthetic construct
  source 1..10: mol_type = other RNA
  misc_feature 1..10: note = Description of sequence: Splice site sequence
aaggtaagct

SEQ ID NO: 149 - RNA, 10 nt, synthetic construct
  source 1..10: mol_type = other RNA
  misc_feature 1..10: note = Description of sequence: Splice site sequence
aaggtaagga

SEQ ID NO: 150 - RNA, 10 nt, synthetic construct
  source 1..10: mol_type = other RNA
  misc_feature 1..10: note = Description of sequence: Splice site sequence
aaggtaaggc

SEQ ID NO: 151 - RNA, 10 nt, synthetic construct
  source 1..10: mol_type = other RNA
  misc_feature 1..10: note = Description of sequence: Splice site sequence
aaggtaaggg

SEQ ID NO: 152 - RNA, 10 nt, synthetic construct
  source 1..10: mol_type = other RNA
  misc_feature 1..10: note = Description of sequence: Splice site sequence
aaggtaaggt

SEQ ID NO: 153 - RNA, 10 nt, synthetic construct
  source 1..10: mol_type = other RNA
  misc_feature 1..10: note = Description of sequence: Splice site sequence
aaggtaagta

SEQ ID NO: 154 - RNA, 10 nt, synthetic construct
  source 1..10: mol_type = other RNA
  misc_feature 1..10: note = Description of sequence: Splice site sequence
aaggtaagtc

SEQ ID NO: 155 - RNA, 10 nt, synthetic construct
  source 1..10: mol_type = other RNA
  misc_feature 1..10: note = Description of sequence: Splice site sequence
aaggtaagtg

SEQ ID NO: 156 - RNA, 10 nt, synthetic construct
  source 1..10: mol_type = other RNA
  misc_feature 1..10: note = Description of sequence: Splice site sequence
aaggtaagtt

SEQ ID NO: 157 - RNA, 10 nt, synthetic construct
  source 1..10: mol_type = other RNA
  misc_feature 1..10: note = Description of sequence: Splice site sequence
aaggtaataa

SEQ ID NO: 158 - RNA, 10 nt, synthetic construct
  source 1..10: mol_type = other RNA
  misc_feature 1..10: note = Description of sequence: Splice site sequence
aaggtaatac

SEQ ID NO: 159 - RNA, 10 nt, synthetic construct
  source 1..10: mol_type = other RNA
  misc_feature 1..10: note = Description of sequence: Splice site sequence
aaggtaatag

SEQ ID NO: 160 - RNA, 10 nt, synthetic construct
  source 1..10: mol_type = other RNA
  misc_feature 1..10: note = Description of sequence: Splice site sequence
aaggtaatat

SEQ ID NO: 161 - RNA, 10 nt, synthetic construct
  source 1..10: mol_type = other RNA
  misc_feature 1..10: note = Description of sequence: Splice site sequence
aaggtaatca

SEQ ID NO: 162 - RNA, 10 nt, synthetic construct
  source 1..10: mol_type = other RNA
  misc_feature 1..10: note = Description of sequence: Splice site sequence
aaggtaatcc

SEQ ID NO: 163 - RNA, 10 nt, synthetic construct
  source 1..10: mol_type = other RNA
  misc_feature 1..10: note = Description of sequence: Splice site sequence
aaggtaatct

SEQ ID NO: 164 - RNA, 10 nt, synthetic construct
  source 1..10: mol_type = other RNA
  misc_feature 1..10: note = Description of sequence: Splice site sequence
aaggtaatga

SEQ ID NO: 165 - RNA, 10 nt, synthetic construct
  source 1..10: mol_type = other RNA
  misc_feature 1..10: note = Description of sequence: Splice site sequence
aaggtaatgc

SEQ ID NO: 166 - RNA, 10 nt, synthetic construct
  source 1..10: mol_type = other RNA
  misc_feature 1..10: note = Description of sequence: Splice site sequence
aaggtaatgg

SEQ ID NO: 167 - RNA, 10 nt, synthetic construct
  source 1..10: mol_type = other RNA
  misc_feature 1..10: note = Description of sequence: Splice site sequence
aaggtaatgt

SEQ ID NO: 168 - RNA, 10 nt, synthetic construct
  source 1..10: mol_type = other RNA
  misc_feature 1..10: note = Description of sequence: Splice site sequence
aaggtaatta

SEQ ID NO: 169 - RNA, 10 nt, synthetic construct
  source 1..10: mol_type = other RNA
  misc_feature 1..10: note = Description of sequence: Splice site sequence
aaggtaattc

SEQ ID NO: 170 - RNA, 10 nt, synthetic construct
  source 1..10: mol_type = other RNA
  misc_feature 1..10: note = Description of sequence: Splice site sequence
aaggtaattg

SEQ ID NO: 171 - RNA, 10 nt, synthetic construct
  source 1..10: mol_type = other RNA
  misc_feature 1..10: note = Description of sequence: Splice site sequence
aaggtaattt

SEQ ID NO: 172 - RNA, 10 nt, synthetic construct
  source 1..10: mol_type = other RNA
  misc_feature 1..10: note = Description of sequence: Splice site sequence
aaggtacaaa

SEQ ID NO: 173 - RNA, 10 nt, synthetic construct
  source 1..10: mol_type = other RNA
  misc_feature 1..10: note = Description of sequence: Splice site sequence
aaggtacaag

SEQ ID NO: 174 - RNA, 10 nt, synthetic construct
  source 1..10: mol_type = other RNA
  misc_feature 1..10: note = Description of sequence: Splice site sequence
aaggtacaat

SEQ ID NO: 175 - RNA, 10 nt, synthetic construct
  source 1..10: mol_type = other RNA
  misc_feature 1..10: note = Description of sequence: Splice site sequence
aaggtacacc

SEQ ID NO: 176 - RNA, 10 nt, synthetic construct
  source 1..10: mol_type = other RNA
  misc_feature 1..10: note = Description of sequence: Splice site sequence
aaggtacact

SEQ ID NO: 177 - RNA, 10 nt, synthetic construct
  source 1..10: mol_type = other RNA
  misc_feature 1..10: note = Description of sequence: Splice site sequence
aaggtacagg

SEQ ID NO: 178 - RNA, 10 nt, synthetic construct
  source 1..10: mol_type = other RNA
  misc_feature 1..10: note = Description of sequence: Splice site sequence
aaggtacagt

SEQ ID NO: 179 - RNA, 10 nt, synthetic construct
  source 1..10: mol_type = other RNA
  misc_feature 1..10: note = Description of sequence: Splice site sequence
aaggtacata

SEQ ID NO: 180 - RNA, 10 nt, synthetic construct
  source 1..10: mol_type = other RNA
  misc_feature 1..10: note = Description of sequence: Splice site sequence
aaggtacatg

SEQ ID NO: 181 - RNA, 10 nt, synthetic construct
  source 1..10: mol_type = other RNA
  misc_feature 1..10: note = Description of sequence: Splice site sequence
aaggtacatt

SEQ ID NO: 182 - RNA, 10 nt, synthetic construct
  source 1..10: mol_type = other RNA
  misc_feature 1..10: note = Description of sequence: Splice site sequence
aaggtaccaa

SEQ ID NO: 183 - RNA, 10 nt, synthetic construct
  source 1..10: mol_type = other RNA
  misc_feature 1..10: note = Description of sequence: Splice site sequence
aaggtaccag

SEQ ID NO: 184 - RNA, 10 nt, synthetic construct
  source 1..10: mol_type = other RNA
  misc_feature 1..10: note = Description of sequence: Splice site sequence
aaggtaccca

SEQ ID NO: 185 - RNA, 10 nt, synthetic construct
  source 1..10: mol_type = other RNA
  misc_feature 1..10: note = Description of sequence: Splice site sequence
aaggtaccct

SEQ ID NO: 186 - RNA, 10 nt, synthetic construct
  source 1..10: mol_type = other RNA
  misc_feature 1..10: note = Description of sequence: Splice site sequence
aaggtacctc

SEQ ID NO: 187 - RNA, 10 nt, synthetic construct
  source 1..10: mol_type = other RNA
  misc_feature 1..10: note = Description of sequence: Splice site sequence
aaggtacctg

SEQ ID NO: 188 - RNA, 10 nt, synthetic construct
  source 1..10: mol_type = other RNA
  misc_feature 1..10: note = Description of sequence: Splice site sequence
aaggtacctt

SEQ ID NO: 189 - RNA, 10 nt, synthetic construct
  source 1..10: mol_type = other RNA
  misc_feature 1..10: note = Description of sequence: Splice site sequence
aaggtacgaa

SEQ ID NO: 190 - RNA, 10 nt, synthetic construct
  source 1..10: mol_type = other RNA
  misc_feature 1..10: note = Description of sequence: Splice site sequence
aaggtacggg

SEQ ID NO: 191 - RNA, 10 nt, synthetic construct
  source 1..10: mol_type = other RNA
  misc_feature 1..10: note = Description of sequence: Splice site sequence
aaggtacggt

SEQ ID NO: 192 - RNA, 10 nt, synthetic construct
  source 1..10: mol_type = other RNA
  misc_feature 1..10: note = Description of sequence: Splice site sequence
aaggtacgtc

SEQ ID NO: 193 - RNA, 10 nt, synthetic construct
  source 1..10: mol_type = other RNA
  misc_feature 1..10: note = Description of sequence: Splice site sequence
aaggtacgtt

SEQ ID NO: 194 - RNA, 10 nt, synthetic construct
  source 1..10: mol_type = other RNA
  misc_feature 1..10: note = Description of sequence: Splice site sequence
aaggtactaa

SEQ ID NO: 195 - RNA, 10 nt, synthetic construct
  source 1..10: mol_type = other RNA
  misc_feature 1..10: note = Description of sequence: Splice site sequence
aaggtactat

SEQ ID NO: 196 - RNA, 10 nt, synthetic construct
  source 1..10: mol_type = other RNA
  misc_feature 1..10: note = Description of sequence: Splice site sequence
aaggtactct

SEQ ID NO: 197 - RNA, 10 nt, synthetic construct
  source 1..10: mol_type = other RNA
  misc_feature 1..10: note = Description of sequence: Splice site sequence
aaggtactga

SEQ ID NO: 198 - RNA, 10 nt, synthetic construct
  source 1..10: mol_type = other RNA
  misc_feature 1..10: note = Description of sequence: Splice site sequence
aaggtactgc

SEQ ID NO: 199 - RNA, 10 nt, synthetic construct
  source 1..10: mol_type = other RNA
  misc_feature 1..10: note = Description of sequence: Splice site sequence
aaggtactgt

SEQ ID NO: 200 - RNA, 10 nt, synthetic construct
  source 1..10: mol_type = other RNA
  misc_feature 1..10: note = Description of sequence: Splice site sequence
aaggtacttc

SEQ ID NO: 201 - RNA, 10 nt, synthetic construct
  source 1..10: mol_type = other RNA
  misc_feature 1..10: note = Description of sequence: Splice site sequence
aaggtacttg

SEQ ID NO: 202 - RNA, 10 nt, synthetic construct
  source 1..10: mol_type = other RNA
  misc_feature 1..10: note = Description of sequence: Splice site sequence
aaggtacttt

SEQ ID NO: 203 - RNA, 10 nt, synthetic construct
  source 1..10: mol_type = other RNA
  misc_feature 1..10: note = Description of sequence: Splice site sequence
aaggtagaaa

SEQ ID NO: 204 - RNA, 10 nt, synthetic construct
  source 1..10: mol_type = other RNA
  misc_feature 1..10: note = Description of sequence: Splice site sequence
aaggtagaac

SEQ ID NO: 205 - RNA, 10 nt, synthetic construct
  source 1..10: mol_type = other RNA
  misc_feature 1..10: note = Description of sequence: Splice site sequence
aaggtagaca

SEQ ID NO: 206 - RNA, 10 nt, synthetic construct
  source 1..10: mol_type = other RNA
  misc_feature 1..10: note = Description of sequence: Splice site sequence
aaggtagacc

SEQ ID NO: 207 - RNA, 10 nt, synthetic construct
  source 1..10: mol_type = other RNA
  misc_feature 1..10: note = Description of sequence: Splice site sequence
aaggtagact

SEQ ID NO: 208 - RNA, 10 nt, synthetic construct
  source 1..10: mol_type = other RNA
  misc_feature 1..10: note = Description of sequence: Splice site sequence
aaggtagagt

SEQ ID NO: 209 - RNA, 10 nt, synthetic construct
  source 1..10: mol_type = other RNA
  misc_feature 1..10: note = Description of sequence: Splice site sequence
aaggtagata

SEQ ID NO: 210 - RNA, 10 nt, synthetic construct
  source 1..10: mol_type = other RNA
  misc_feature 1..10: note = Description of sequence: Splice site sequence
aaggtagcaa

SEQ ID NO: 211 - RNA, 10 nt, synthetic construct
  source 1..10: mol_type = other RNA
  misc_feature 1..10: note = Description of sequence: Splice site sequence
aaggtagcag

SEQ ID NO: 212 - RNA, 10 nt, synthetic construct
  source 1..10: mol_type = other RNA
  misc_feature 1..10: note = Description of sequence: Splice site sequence
aaggtagcca

SEQ ID NO: 213 - RNA, 10 nt, synthetic construct
  source 1..10: mol_type = other RNA
  misc_feature 1..10: note = Description of sequence: Splice site sequence
aaggtagcct

SEQ ID NO: 214 - RNA, 10 nt, synthetic construct
  source 1..10: mol_type = other RNA
  misc_feature 1..10: note = Description of sequence: Splice site sequence
aaggtagcta

SEQ ID NO: 215 - RNA, 10 nt, synthetic construct
  source 1..10: mol_type = other RNA
  misc_feature 1..10: note = Description of sequence: Splice site sequence
aaggtagctg

SEQ ID NO: 216 - RNA, 10 nt, synthetic construct
  source 1..10: mol_type = other RNA
  misc_feature 1..10: note = Description of sequence: Splice site sequence
aaggtagctt

SEQ ID NO: 217 - RNA, 10 nt, synthetic construct
  source 1..10: mol_type = other RNA
  misc_feature 1..10: note = Description of sequence: Splice site sequence
aaggtaggaa

SEQ ID NO: 218 - RNA, 10 nt, synthetic construct
  source 1..10: mol_type = other RNA
  misc_feature 1..10: note = Description of sequence: Splice site sequence
aaggtaggag

SEQ ID NO: 219 - RNA, 10 nt, synthetic construct
  source 1..10: mol_type = other RNA
  misc_feature 1..10: note = Description of sequence: Splice site sequence
aaggtaggat

SEQ ID NO: 220 - RNA, 10 nt, synthetic construct
  source 1..10: mol_type = other RNA
  misc_feature 1..10: note = Description of sequence: Splice site sequence
aaggtaggca

SEQ ID NO: 221 - RNA, 10 nt, synthetic construct
  source 1..10: mol_type = other RNA
  misc_feature 1..10: note = Description of sequence: Splice site sequence
aaggtaggcc

SEQ ID NO: 222 - RNA, 10 nt, synthetic construct
  source 1..10: mol_type = other RNA
  misc_feature 1..10: note = Description of sequence: Splice site sequence
aaggtaggct

SEQ ID NO: 223 - RNA, 10 nt, synthetic construct
  source 1..10: mol_type = other RNA
  misc_feature 1..10: note = Description of sequence: Splice site sequence
aaggtaggga

SEQ ID NO: 224 - RNA, 10 nt, synthetic construct
  source 1..10: mol_type = other RNA
  misc_feature 1..10: note = Description of sequence: Splice site sequence
aaggtagggc

SEQ ID NO: 225 - RNA, 10 nt, synthetic construct
  source 1..10: mol_type = other RNA
  misc_feature 1..10: note = Description of sequence: Splice site sequence
aaggtagggg

SEQ ID NO: 226 - RNA, 10 nt, synthetic construct
  source 1..10: mol_type = other RNA
  misc_feature 1..10: note = Description of sequence: Splice site sequence
aaggtagggt

SEQ ID NO: 227 - RNA, 10 nt, synthetic construct
  source 1..10: mol_type = other RNA
  misc_feature 1..10: note = Description of sequence: Splice site sequence
aaggtaggta

SEQ ID NO: 228 - RNA, 10 nt, synthetic construct
  source 1..10: mol_type = other RNA
  misc_feature 1..10: note = Description of sequence: Splice site sequence
aaggtaggtc

SEQ ID NO: 229 - RNA, 10 nt, synthetic construct
  source 1..10: mol_type = other RNA
  misc_feature 1..10: note = Description of sequence: Splice site sequence
aaggtaggtg

SEQ ID NO: 230 - RNA, 10 nt, synthetic construct
  source 1..10: mol_type = other RNA
  misc_feature 1..10: note = Description of sequence: Splice site sequence
aaggtaggtt

SEQ ID NO: 231 - RNA, 10 nt, synthetic construct
  source 1..10: mol_type = other RNA
  misc_feature 1..10: note = Description of sequence: Splice site sequence
aaggtagtaa

SEQ ID NO: 232 - RNA, 10 nt, synthetic construct
  source 1..10: mol_type = other RNA
  misc_feature 1..10: note = Description of sequence: Splice site sequence
aaggtagtag

SEQ ID NO: 233 - RNA, 10 nt, synthetic construct
  source 1..10: mol_type = other RNA
  misc_feature 1..10: note = Description of sequence: Splice site sequence
aaggtagtct

SEQ ID NO: 234 - RNA, 10 nt, synthetic construct
  source 1..10: mol_type = other RNA
  misc_feature 1..10: note = Description of sequence: Splice site sequence
aaggtagtgc

SEQ ID NO: 235 - RNA, 10 nt, synthetic construct
  source 1..10: mol_type = other RNA
  misc_feature 1..10: note = Description of sequence: Splice site sequence
aaggtagtgg

SEQ ID NO: 236 - RNA, 10 nt, synthetic construct
  source 1..10: mol_type = other RNA
  misc_feature 1..10: note = Description of sequence: Splice site sequence
aaggtagttc

SEQ ID NO: 237 - RNA, 10 nt, synthetic construct
  source 1..10: mol_type = other RNA
  misc_feature 1..10: note = Description of sequence: Splice site sequence
aaggtagttt

SEQ ID NO: 238 - RNA, 10 nt, synthetic construct
  source 1..10: mol_type = other RNA
  misc_feature 1..10: note = Description of sequence: Splice site sequence
aaggtataaa

SEQ ID NO: 239 - RNA, 10 nt, synthetic construct
  source 1..10: mol_type = other RNA
  misc_feature 1..10: note = Description of sequence: Splice site sequence
aaggtataat

SEQ ID NO: 240 - RNA, 10 nt, synthetic construct
  source 1..10: mol_type = other RNA
  misc_feature 1..10: note = Description of sequence: Splice site sequence
aaggtataca

SEQ ID NO: 241 - RNA, 10 nt, synthetic construct
  source 1..10: mol_type = other RNA
  misc_feature 1..10: note = Description of sequence: Splice site sequence
aaggtatact

SEQ ID NO: 242 - RNA, 10 nt, synthetic construct
  source 1..10: mol_type = other RNA
  misc_feature 1..10: note = Description of sequence: Splice site sequence
aaggtatata

SEQ ID NO: 243 - RNA, 10 nt, synthetic construct
  source 1..10: mol_type = other RNA
  misc_feature 1..10: note = Description of sequence: Splice site sequence
aaggtatatc

SEQ ID NO: 244 - RNA, 10 nt, synthetic construct
  source 1..10: mol_type = other RNA
  misc_feature 1..10: note = Description of sequence: Splice site sequence
aaggtatatg

SEQ ID NO: 245 - RNA, 10 nt, synthetic construct
  source 1..10: mol_type = other RNA
  misc_feature 1..10: note = Description of sequence: Splice site sequence
aaggtatatt

SEQ ID NO: 246 - RNA, 10 nt, synthetic construct
  source 1..10: mol_type = other RNA
  misc_feature 1..10: note = Description of sequence: Splice site sequence
aaggtatcac

SEQ ID NO: 247 - RNA, 10 nt, synthetic construct
  source 1..10: mol_type = other RNA
  misc_feature 1..10: note = Description of sequence: Splice site sequence
aaggtatcag

SEQ ID NO: 248 - RNA, 10 nt, synthetic construct
  source 1..10: mol_type = other RNA
  misc_feature 1..10: note = Description of sequence: Splice site sequence
aaggtatccc

SEQ ID NO: 249 - RNA, 10 nt, synthetic construct
  source 1..10: mol_type = other RNA
  misc_feature 1..10: note = Description of sequence: Splice site sequence
aaggtatcct

SEQ ID NO: 250 - RNA, 10 nt, synthetic construct
  source 1..10: mol_type = other RNA
  misc_feature 1..10: note = Description of sequence: Splice site sequence
aaggtatctc

SEQ ID NO: 251 - RNA, 10 nt, synthetic construct
  source 1..10: mol_type = other RNA
  misc_feature 1..10: note = Description of sequence: Splice site sequence
aaggtatctg

SEQ ID NO: 252 - RNA, 10 nt, synthetic construct
  source 1..10: mol_type = other RNA
  misc_feature 1..10: note = Description of sequence: Splice site sequence
aaggtatctt

SEQ ID NO: 253 - RNA, 10 nt, synthetic construct
  source 1..10: mol_type = other RNA
  misc_feature 1..10: note = Description of sequence: Splice site sequence
aaggtatgaa

SEQ ID NO: 254 - RNA, 10 nt, synthetic construct
  source 1..10: mol_type = other RNA
  misc_feature 1..10: note = Description of sequence: Splice site sequence
aaggtatgac

SEQ ID NO: 255 - RNA, 10 nt, synthetic construct
  source 1..10: mol_type = other RNA
  misc_feature 1..10: note = Description of sequence: Splice site sequence
aaggtatgag

SEQ ID NO: 256 - RNA, 10 nt, synthetic construct
  source 1..10: mol_type = other RNA
  misc_feature 1..10: note = Description of sequence: Splice site sequence
aaggtatgat

SEQ ID NO: 257 - RNA, 10 nt, synthetic construct
  source 1..10: mol_type = other RNA
  misc_feature 1..10: note = Description of sequence: Splice site sequence
aaggtatgca

SEQ ID NO: 258 - RNA, 10 nt, synthetic construct
  source 1..10: mol_type = other RNA
  misc_feature 1..10: note = Description of sequence: Splice site sequence
aaggtatgcc

SEQ ID NO: 259 - RNA, 10 nt, synthetic construct
  source 1..10: mol_type = other RNA
  misc_feature 1..10: note = Description of sequence: Splice site sequence
aaggtatgct

SEQ ID NO: 260 - RNA, 10 nt, synthetic construct
  source 1..10: mol_type = other RNA
  misc_feature 1..10: note = Description of sequence: Splice site sequence
aaggtatgga

SEQ ID NO: 261 - RNA, 10 nt, synthetic construct
  source 1..10: mol_type = other RNA
  misc_feature 1..10: note = Description of sequence: Splice site sequence
aaggtatggc

SEQ ID NO: 262 - RNA, 10 nt, synthetic construct
  source 1..10: mol_type = other RNA
  misc_feature 1..10: note = Description of sequence: Splice site sequence
aaggtatggg

SEQ ID NO: 263 - RNA, 10 nt, synthetic construct
  source 1..10: mol_type = other RNA
  misc_feature 1..10: note = Description of sequence: Splice site sequence
aaggtatgta

SEQ ID NO: 264 - RNA, 10 nt, synthetic construct
  source 1..10: mol_type = other RNA
  misc_feature 1..10: note = Description of sequence: Splice site sequence
aaggtatgtc

SEQ ID NO: 265 - RNA, 10 nt, synthetic construct
  source 1..10: mol_type = other RNA
  misc_feature 1..10: note = Description of sequence: Splice site sequence
aaggtatgtg

SEQ ID NO: 266 - RNA, 10 nt, synthetic construct
  source 1..10: mol_type = other RNA
  misc_feature 1..10: note = Description of sequence: Splice site sequence
aaggtatgtt

SEQ ID NO: 267 - RNA, 10 nt, synthetic construct
  source 1..10: mol_type = other RNA
  misc_feature 1..10: note = Description of sequence: Splice site sequence
aaggtattaa

SEQ ID NO: 268 - RNA, 10 nt, synthetic construct
  source 1..10: mol_type = other RNA
  misc_feature 1..10: note = Description of sequence: Splice site sequence
aaggtattac

SEQ ID NO: 269 - RNA, 10 nt, synthetic construct
  source 1..10: mol_type = other RNA
  misc_feature 1..10: note = Description of sequence: Splice site sequence
aaggtattag

SEQ ID NO: 270 - RNA, 10 nt, synthetic construct
  source 1..10: mol_type = other RNA
  misc_feature 1..10: note = Description of sequence: Splice site sequence
aaggtattat

SEQ ID NO: 271 - RNA, 10 nt, synthetic construct
  source 1..10: mol_type = other RNA
  misc_feature 1..10: note = Description of sequence: Splice site sequence
aaggtattcc

SEQ ID NO: 272 - RNA, 10 nt, synthetic construct
  source 1..10: mol_type = other RNA
  misc_feature 1..10: note = Description of sequence: Splice site sequence
aaggtattga

SEQ ID NO: 273 - RNA, 10 nt, synthetic construct
  source 1..10: mol_type = other RNA
  misc_feature 1..10: note = Description of sequence: Splice site sequence
aaggtattgt

SEQ ID NO: 274 - RNA, 10 nt, synthetic construct
  source 1..10: mol_type = other RNA
  misc_feature 1..10: note = Description of sequence: Splice site sequence
aaggtattta

SEQ ID NO: 275 - RNA, 10 nt, synthetic construct
  source 1..10: mol_type = other RNA
  misc_feature 1..10: note = Description of sequence: Splice site sequence
aaggtatttc

SEQ ID NO: 276 - RNA, 10 nt, synthetic construct
  source 1..10: mol_type = other RNA
  misc_feature 1..10: note = Description of sequence: Splice site sequence
aaggtatttg

SEQ ID NO: 277 - RNA, 10 nt, synthetic construct
  source 1..10: mol_type = other RNA
  misc_feature 1..10: note = Description of sequence: Splice site sequence
aaggtatttt

SEQ ID NO: 278 - RNA, 10 nt, synthetic construct
  source 1..10: mol_type = other RNA
  misc_feature 1..10: note = Description of sequence: Splice site sequence
aaggtcaaat

SEQ ID NO: 279 - RNA, 10 nt, synthetic construct
  source 1..10: mol_type = other RNA
  misc_feature 1..10: note = Description of sequence: Splice site sequence
aaggtcaaga

SEQ ID NO: 280 - RNA, 10 nt, synthetic construct
  source 1..10: mol_type = other RNA
  misc_feature 1..10: note = Description of sequence: Splice site sequence
aaggtcaagt

SEQ ID NO: 281 - RNA, 10 nt, synthetic construct
  source 1..10: mol_type = other RNA
  misc_feature 1..10: note = Description of sequence: Splice site sequence
aaggtcacag

SEQ ID NO: 282 - RNA, 10 nt, synthetic construct
  source 1..10: mol_type = other RNA
  misc_feature 1..10: note = Description of sequence: Splice site sequence
aaggtcagaa

SEQ ID NO: 283 - RNA, 10 nt, synthetic construct
  source 1..10: mol_type = other RNA
  misc_feature 1..10: note = Description of sequence: Splice site sequence
aaggtcagac

SEQ ID NO: 284 - RNA, 10 nt, synthetic construct
  source 1..10: mol_type = other RNA
  misc_feature 1..10: note = Description of sequence: Splice site sequence
aaggtcagag

SEQ ID NO: 285 - RNA, 10 nt, synthetic construct
  source 1..10: mol_type = other RNA
  misc_feature 1..10: note = Description of sequence: Splice site sequence
aaggtcagca

SEQ ID NO: 286 - RNA, 10 nt, synthetic construct
  source 1..10: mol_type = other RNA
  misc_feature 1..10: note = Description of sequence: Splice site sequence
aaggtcagcc

SEQ ID NO: 287 - RNA, 10 nt, synthetic construct
  source 1..10: mol_type = other RNA
  misc_feature 1..10: note = Description of sequence: Splice site sequence
aaggtcagcg

SEQ ID NO: 288 - RNA, 10 nt, synthetic construct
  source 1..10: mol_type = other RNA
  misc_feature 1..10: note = Description of sequence: Splice site sequence
aaggtcagct

SEQ ID NO: 289 - RNA, 10 nt, synthetic construct
  source 1..10: mol_type = other RNA
  misc_feature 1..10: note = Description of sequence: Splice site sequence
aaggtcagga

SEQ ID NO: 290 - RNA, 10 nt, synthetic construct
  source 1..10: mol_type = other RNA
  misc_feature 1..10: note = Description of sequence: Splice site sequence
aaggtcaggc

SEQ ID NO: 291 - RNA, 10 nt, synthetic construct
  source 1..10: mol_type = other RNA
  misc_feature 1..10: note = Description of sequence: Splice site sequence
aaggtcaggg

SEQ ID NO: 292 - RNA, 10 nt, synthetic construct
  source 1..10: mol_type = other RNA
  misc_feature 1..10: note = Description of sequence: Splice site sequence
aaggtcaggt

SEQ ID NO: 293 - RNA, 10 nt, synthetic construct
  source 1..10: mol_type = other RNA
  misc_feature 1..10: note = Description of sequence: Splice site sequence
aaggtcagta

SEQ ID NO: 294 - RNA, 10 nt, synthetic construct
  source 1..10: mol_type = other RNA
  misc_feature 1..10: note = Description of sequence: Splice site sequence
aaggtcagtc

SEQ ID NO: 295 - RNA, 10 nt, synthetic construct
  source 1..10: mol_type = other RNA
  misc_feature 1..10: note = Description of sequence: Splice site sequence
aaggtcagtg

SEQ ID NO: 296 - RNA, 10 nt, synthetic construct
  source 1..10: mol_type = other RNA
  misc_feature 1..10: note = Description of sequence: Splice site sequence
aaggtcagtt

SEQ ID NO: 297 - RNA, 10 nt, synthetic construct
  source 1..10: mol_type = other RNA
  misc_feature 1..10: note = Description of sequence: Splice site sequence
aaggtcatag

SEQ ID NO: 298 - RNA, 10 nt, synthetic construct
  source 1..10: mol_type = other RNA
  misc_feature 1..10: note = Description of sequence: Splice site sequence
aaggtcatct

SEQ ID NO: 299 - RNA, 10 nt, synthetic construct
  source 1..10: mol_type = other RNA
  misc_feature 1..10: note = Description of sequence: Splice site sequence
aaggtccaca

SEQ ID NO: 300 - RNA, 10 nt, synthetic construct
  source 1..10: mol_type = other RNA
  misc_feature 1..10: note = Description of sequence: Splice site sequence
aaggtccaga

SEQ ID NO: 301 - RNA, 10 nt, synthetic construct
  source 1..10: mol_type = other RNA
  misc_feature 1..10: note = Description of sequence: Splice site sequence
aaggtccata

SEQ ID NO: 302 - RNA, 10 nt, synthetic construct
  source 1..10: mol_type = other RNA
  misc_feature 1..10: note = Description of sequence: Splice site sequence
aaggtcccag

SEQ ID NO: 303 - RNA, 10 nt, synthetic construct
  source 1..10: mol_type = other RNA
  misc_feature 1..10: note = Description of sequence: Splice site sequence
aaggtccctc

SEQ ID NO: 304 - RNA, 10 nt, synthetic construct
  source 1..10: mol_type = other RNA
  misc_feature 1..10: note = Description of sequence: Splice site sequence
aaggtccttc

SEQ ID NO: 305 - RNA, 10 nt, synthetic construct
  source 1..10: mol_type = other RNA
  misc_feature 1..10: note = Description of sequence: Splice site sequence
aaggtcgagg

SEQ ID NO: 306 - RNA, 10 nt, synthetic construct
  source 1..10: mol_type = other RNA
  misc_feature 1..10: note = Description of sequence: Splice site sequence
aaggtctaat

SEQ ID NO: 307 - RNA, 10 nt, synthetic construct
  source 1..10: mol_type = other RNA
  misc_feature 1..10: note = Description of sequence: Splice site sequence
aaggtctacc

SEQ ID NO: 308 - RNA, 10 nt, synthetic construct
  source 1..10: mol_type = other RNA
  misc_feature 1..10: note = Description of sequence: Splice site sequence
aaggtctata

SEQ ID NO: 309 - RNA, 10 nt, synthetic construct
  source 1..10: mol_type = other RNA
  misc_feature 1..10: note = Description of sequence: Splice site sequence
aaggtctcct

SEQ ID NO: 310 - RNA, 10 nt, synthetic construct
  source 1..10: mol_type = other RNA
  misc_feature 1..10: note = Description of sequence: Splice site sequence
aaggtctctg

SEQ ID NO: 311 - RNA, 10 nt, synthetic construct
  source 1..10: mol_type = other RNA
  misc_feature 1..10: note = Description of sequence: Splice site sequence
aaggtctctt

SEQ ID NO: 312 - RNA, 10 nt, synthetic construct
  source 1..10: mol_type = other RNA
  misc_feature 1..10: note = Description of sequence: Splice site sequence
aaggtctgaa

SEQ ID NO: 313 - RNA, 10 nt, synthetic construct
  source 1..10: mol_type = other RNA
  misc_feature 1..10: note = Description of sequence: Splice site sequence
aaggtctgag

SEQ ID NO: 314 - RNA, 10 nt, synthetic construct
  source 1..10: mol_type = other RNA
  misc_feature 1..10: note = Description of sequence: Splice site sequence
aaggtctgga

SEQ ID NO: 315 - RNA, 10 nt, synthetic construct
  source 1..10: mol_type = other RNA
  misc_feature 1..10: note = Description of sequence: Splice site sequence
aaggtctggg

SEQ ID NO: 316 - RNA, 10 nt, synthetic construct
  source 1..10: mol_type = other RNA
  misc_feature 1..10: note = Description of sequence: Splice site sequence
aaggtctgta

SEQ ID NO: 317 - RNA, 10 nt, synthetic construct
  source 1..10: mol_type = other RNA
  misc_feature 1..10: note = Description of sequence: Splice site sequence
aaggtctgtt

SEQ ID NO: 318 - RNA, 10 nt, synthetic construct
  source 1..10: mol_type = other RNA
  misc_feature 1..10: note = Description of sequence: Splice site sequence
aaggtcttct

SEQ ID NO: 319 - RNA, 10 nt, synthetic construct
  source 1..10: mol_type = other RNA
  misc_feature 1..10: note = Description of sequence: Splice site sequence
aaggtctttt

SEQ ID NO: 320 - RNA, 10 nt, synthetic construct
  source 1..10: mol_type = other RNA
  misc_feature 1..10: note = Description of sequence: Splice site sequence
aaggtgaaac

SEQ ID NO: 321 - RNA, 10 nt, synthetic construct
  source 1..10: mol_type = other RNA
  misc_feature 1..10: note = Description of sequence: Splice site sequence
aaggtgaaag

SEQ ID NO: 322 - RNA, 10 nt, synthetic construct
  source 1..10: mol_type = other RNA
  misc_feature 1..10: note = Description of sequence: Splice site sequence
aaggtgaaat

SEQ ID NO: 323 - RNA, 10 nt, synthetic construct
  source 1..10: mol_type = other RNA
  misc_feature 1..10: note = Description of sequence: Splice site sequence
aaggtgaact

SEQ ID NO: 324 - RNA, 10 nt, synthetic construct
  source 1..10: mol_type = other RNA
  misc_feature 1..10: note = Description of sequence: Splice site sequence
aaggtgaagc

SEQ ID NO: 325 - RNA, 10 nt, synthetic construct
  source 1..10: mol_type = other RNA
  misc_feature 1..10: note = Description of sequence: Splice site sequence
aaggtgaagg

SEQ ID NO: 326 - RNA, 10 nt, synthetic construct
  source 1..10: mol_type = other RNA
  misc_feature 1..10: note = Description of sequence: Splice site sequence
aaggtgaagt

SEQ ID NO: 327 - RNA, 10 nt, synthetic construct
  source 1..10: mol_type = other RNA
  misc_feature 1..10: note = Description of sequence: Splice site sequence
aaggtgaata

SEQ ID NO: 328 - RNA, 10 nt, synthetic construct
  source 1..10: mol_type = other RNA
  misc_feature 1..10: note = Description of sequence: Splice site sequence
aaggtgaatg

SEQ ID NO: 329 - RNA, 10 nt, synthetic construct
  source 1..10: mol_type = other RNA
  misc_feature 1..10: note = Description of sequence: Splice site sequence
aaggtgaatt

SEQ ID NO: 330 - RNA, 10 nt, synthetic construct
  source 1..10: mol_type = other RNA
  misc_feature 1..10: note = Description of sequence: Splice site sequence
aaggtgacaa

SEQ ID NO: 331 - RNA, 10 nt, synthetic construct
  source 1..10: mol_type = other RNA
  misc_feature 1..10: note = Description of sequence: Splice site sequence
aaggtgacag

SEQ ID NO: 332 - RNA, 10 nt, synthetic construct
  source 1..10: mol_type = other RNA
  misc_feature 1..10: note = Description of sequence: Splice site sequence
aaggtgacat

SEQ ID NO: 333 - RNA, 10 nt, synthetic construct
  source 1..10: mol_type = other RNA
  misc_feature 1..10: note = Description of sequence: Splice site sequence
aaggtgactg

SEQ ID NO: 334 - RNA, 10 nt, synthetic construct
  source 1..10: mol_type = other RNA
  misc_feature 1..10: note = Description of sequence: Splice site sequence
aaggtgactt

SEQ ID NO: 335 - RNA, 10 nt, synthetic construct
  source 1..10: mol_type = other RNA
  misc_feature 1..10: note = Description of sequence: Splice site sequence
aaggtgagaa

SEQ ID NO: 336 - RNA, 10 nt, synthetic construct
  source 1..10: mol_type = other RNA
  misc_feature 1..10: note = Description of sequence: Splice site sequence
aaggtgagac

SEQ ID NO: 337 - RNA, 10 nt, synthetic construct
  source 1..10: mol_type = other RNA
  misc_feature 1..10: note = Description of sequence: Splice site sequence
aaggtgagag

SEQ ID NO: 338 - RNA, 10 nt, synthetic construct
  source 1..10: mol_type = other RNA
  misc_feature 1..10: note = Description of sequence: Splice site sequence
aaggtgagat

SEQ ID NO: 339 - RNA, 10 nt, synthetic construct
  source 1..10: mol_type = other RNA
  misc_feature 1..10: note = Description of sequence: Splice site sequence
aaggtgagca

SEQ ID NO: 340 - RNA, 10 nt, synthetic construct
  source 1..10: mol_type = other RNA
  misc_feature 1..10: note = Description of sequence: Splice site sequence
aaggtgagcc

SEQ ID NO: 341 - RNA, 10 nt, synthetic construct
  source 1..10: mol_type = other RNA
  misc_feature 1..10: note = Description of sequence: Splice site sequence
aaggtgagcg

SEQ ID NO: 342 - RNA, 10 nt, synthetic construct
  source 1..10: mol_type = other RNA
  misc_feature 1..10: note = Description of sequence: Splice site sequence
aaggtgagct

SEQ ID NO: 343 - RNA, 10 nt, synthetic construct
  source 1..10: mol_type = other RNA
  misc_feature 1..10: note = Description of sequence: Splice site sequence
aaggtgagga

SEQ ID NO: 344 - RNA, 10 nt, synthetic construct
  source 1..10: mol_type = other RNA
  misc_feature 1..10: note = Description of sequence: Splice site sequence
aaggtgaggc

SEQ ID NO: 345 - RNA, 10 nt, synthetic construct
  source 1..10: mol_type = other RNA
  misc_feature 1..10: note = Description of sequence: Splice site sequence
aaggtgaggg

SEQ ID NO: 346 - RNA, 10 nt, synthetic construct
  source 1..10: mol_type = other RNA
  misc_feature 1..10: note = Description of sequence: Splice site sequence
aaggtgaggt

SEQ ID NO: 347 - RNA, 10 nt, synthetic construct
  source 1..10: mol_type = other RNA
  misc_feature 1..10: note = Description of sequence: Splice site sequence
aaggtgagta

SEQ ID NO: 348 - RNA, 10 nt, synthetic construct
  source 1..10: mol_type = other RNA
  misc_feature 1..10: note = Description of sequence: Splice site sequence
aaggtgagtc

SEQ ID NO: 349 - RNA, 10 nt, synthetic construct
  source 1..10: mol_type = other RNA
  misc_feature 1..10: note = Description of sequence: Splice site sequence
aaggtgagtg

SEQ ID NO: 350 - RNA, 10 nt, synthetic construct
  source 1..10: mol_type = other RNA
  misc_feature 1..10: note = Description of sequence: Splice site sequence
aaggtgagtt

SEQ ID NO: 351 - RNA, 10 nt, synthetic construct
  source 1..10: mol_type = other RNA
  misc_feature 1..10: note = Description of sequence: Splice site sequence
aaggtgataa

SEQ ID NO: 352 - RNA, 10 nt, synthetic construct
  source 1..10: mol_type = other RNA
  misc_feature 1..10: note = Description of sequence: Splice site sequence
aaggtgatca

SEQ ID NO: 353 - RNA, 10 nt, synthetic construct
  source 1..10: mol_type = other RNA
  misc_feature 1..10: note = Description of sequence: Splice site sequence
aaggtgatcc

SEQ ID NO: 354 - RNA, 10 nt, synthetic construct
  source 1..10: mol_type = other RNA
  misc_feature 1..10: note = Description of sequence: Splice site sequence
aaggtgatga

SEQ ID NO: 355 - RNA, 10 nt, synthetic construct
  source 1..10: mol_type = other RNA
  misc_feature 1..10: note = Description of sequence: Splice site sequence
aaggtgatgc

SEQ ID NO: 356 - RNA, 10 nt, synthetic construct
  source 1..10: mol_type = other RNA
  misc_feature 1..10: note = Description of sequence: Splice site sequence
aaggtgatgt

SEQ ID NO: 357 - RNA, 10 nt, synthetic construct
  source 1..10: mol_type = other RNA
  misc_feature 1..10: note = Description of sequence: Splice site sequence
aaggtgatta

SEQ ID NO: 358 - RNA, 10 nt, synthetic construct
  source 1..10: mol_type = other RNA
  misc_feature 1..10: note = Description of sequence: Splice site sequence
aaggtgattg

SEQ ID NO: 359 - RNA, 10 nt, synthetic construct
  source 1..10: mol_type = other RNA
  misc_feature 1..10: note = Description of sequence: Splice site sequence
aaggtgattt

SEQ ID NO: 360 - RNA, 10 nt, synthetic construct
  source 1..10: mol_type = other RNA
  misc_feature 1..10: note = Description of sequence: Splice site sequence
aaggtgcaca

SEQ ID NO: 361 - RNA, 10 nt, synthetic construct
  source 1..10: mol_type = other RNA
  misc_feature 1..10: note = Description of sequence: Splice site sequence
aaggtgcatc

SEQ ID NO: 362 - RNA, 10 nt, synthetic construct
  source 1..10: mol_type = other RNA
  misc_feature 1..10: note = Description of sequence: Splice site sequence
aaggtgccct

SEQ ID NO: 363 - RNA, 10 nt, synthetic construct
  source 1..10: mol_type = other RNA
  misc_feature 1..10: note = Description of sequence: Splice site sequence
aaggtgcctg

SEQ ID NO: 364 - RNA, 10 nt, synthetic construct
  source 1..10: mol_type = other RNA
  misc_feature 1..10: note = Description of sequence: Splice site sequence
aaggtgcgtg

SEQ ID NO: 365 - RNA, 10 nt, synthetic construct
  source 1..10: mol_type = other RNA
  misc_feature 1..10: note = Description of sequence: Splice site sequence
aaggtgcgtt

SEQ ID NO: 366 - RNA, 10 nt, synthetic construct
  source 1..10: mol_type = other RNA
  misc_feature 1..10: note = Description of sequence: Splice site sequence
aaggtgctcc

SEQ ID NO: 367 - RNA, 10 nt, synthetic construct
  source 1..10: mol_type = other RNA
  misc_feature 1..10: note = Description of sequence: Splice site sequence
aaggtgctga

SEQ ID NO: 368 - RNA, 10 nt, synthetic construct
  source 1..10: mol_type = other RNA
  misc_feature 1..10: note = Description of sequence: Splice site sequence
aaggtgctgc

SEQ ID NO: 369 - RNA, 10 nt, synthetic construct
  source 1..10: mol_type = other RNA
  misc_feature 1..10: note = Description of sequence: Splice site sequence
aaggtgctgg

SEQ ID NO: 370 - RNA, 10 nt, synthetic construct
  source 1..10: mol_type = other RNA
  misc_feature 1..10: note = Description of sequence: Splice site sequence
aaggtgctta

SEQ ID NO: 371 - RNA, 10 nt, synthetic construct
  source 1..10: mol_type = other RNA
  misc_feature 1..10: note = Description of sequence: Splice site sequence
aaggtgcttt

SEQ ID NO: 372 - RNA, 10 nt, synthetic construct
  source 1..10: mol_type = other RNA
  misc_feature 1..10: note = Description of sequence: Splice site sequence
aaggtggata

SEQ ID NO: 373 - RNA, 10 nt, synthetic construct
  source 1..10: mol_type = other RNA
  misc_feature 1..10: note = Description of sequence: Splice site sequence
aaggtggcta

SEQ ID NO: 374 - RNA, 10 nt, synthetic construct
  source 1..10: mol_type = other RNA
  misc_feature 1..10: note = Description of sequence: Splice site sequence
aaggtggctg

SEQ ID NO: 375 - RNA, 10 nt, synthetic construct
  source 1..10: mol_type = other RNA
  misc_feature 1..10: note = Description of sequence: Splice site sequence
aaggtggctt

SEQ ID NO: 376 - RNA, 10 nt, synthetic construct
  source 1..10: mol_type = other RNA
  misc_feature 1..10: note = Description of sequence: Splice site sequence
aaggtgggaa

SEQ ID NO: 377 - RNA, 10 nt, synthetic construct
  source 1..10: mol_type = other RNA
  misc_feature 1..10: note = Description of sequence: Splice site sequence
aaggtgggag

SEQ ID NO: 378 - RNA, 10 nt, synthetic construct
  source 1..10: mol_type = other RNA
  misc_feature 1..10: note = Description of sequence: Splice site sequence
aaggtgggat

SEQ ID NO: 379 - RNA, 10 nt, synthetic construct
  source 1..10: mol_type = other RNA
  misc_feature 1..10: note = Description of sequence: Splice site sequence
aaggtgggca

SEQ ID NO: 380 - RNA, 10 nt, synthetic construct
  source 1..10: mol_type = other RNA
  misc_feature 1..10: note = Description of sequence: Splice site sequence
aaggtgggcc

SEQ ID NO: 381 - RNA, 10 nt, synthetic construct
  source 1..10: mol_type = other RNA
  misc_feature 1..10: note = Description of sequence: Splice site sequence
aaggtgggcg

SEQ ID NO: 382 - RNA, 10 nt, synthetic construct
  source 1..10: mol_type = other RNA
  misc_feature 1..10: note = Description of sequence: Splice site sequence
aaggtgggga

SEQ ID NO: 383 - RNA, 10 nt, synthetic construct
  source 1..10: mol_type = other RNA
  misc_feature 1..10: note = Description of sequence: Splice site sequence
aaggtggggt

SEQ ID NO: 384 - RNA, 10 nt, synthetic construct
  source 1..10: mol_type = other RNA
  misc_feature 1..10: note = Description of sequence: Splice site sequence
aaggtgggta

SEQ ID NO: 385 - RNA, 10 nt, synthetic construct
  source 1..10: mol_type = other RNA
  misc_feature 1..10: note = Description of sequence: Splice site sequence
aaggtgggtg

SEQ ID NO: 386 - RNA, 10 nt, synthetic construct
  source 1..10: mol_type = other RNA
  misc_feature 1..10: note = Description of sequence: Splice site sequence
aaggtgggtt

SEQ ID NO: 387 - RNA, 10 nt, synthetic construct
  source 1..10: mol_type = other RNA
  misc_feature 1..10: note = Description of sequence: Splice site sequence
aaggtggtaa

SEQ ID NO: 388 - RNA, 10 nt, synthetic construct
  source 1..10: mol_type = other RNA
  misc_feature 1..10: note = Description of sequence: Splice site sequence
aaggtggtac

SEQ ID NO: 389 - RNA, 10 nt, synthetic construct
  source 1..10: mol_type = other RNA
  misc_feature 1..10: note = Description of sequence: Splice site sequence
aaggtggtat

SEQ ID NO: 390 - RNA, 10 nt, synthetic construct
  source 1..10: mol_type = other RNA
  misc_feature 1..10: note = Description of sequence: Splice site sequence
aaggtggtgg

SEQ ID NO: 391 - RNA, 10 nt, synthetic construct
  source 1..10: mol_type = other RNA
  misc_feature 1..10: note = Description of sequence: Splice site sequence
aaggtggtta

SEQ ID NO: 392 - RNA, 10 nt, synthetic construct
  source 1..10: mol_type = other RNA
  misc_feature 1..10: note = Description of sequence: Splice site sequence
aaggtggttc

SEQ ID NO: 393 - RNA, 10 nt, synthetic construct
  source 1..10: mol_type = other RNA
  misc_feature 1..10: note = Description of sequence: Splice site sequence
aaggtggttt

SEQ ID NO: 394 - RNA, 10 nt, synthetic construct
  source 1..10: mol_type = other RNA
  misc_feature 1..10: note = Description of sequence: Splice site sequence
aaggtgtaag

SEQ ID NO: 395 - RNA, 10 nt, synthetic construct
  source 1..10: mol_type = other RNA
  misc_feature 1..10: note = Description of sequence: Splice site sequence
aaggtgtcaa

SEQ ID NO: 396 - RNA, 10 nt, synthetic construct
  source 1..10: mol_type = other RNA
  misc_feature 1..10: note = Description of sequence: Splice site sequence
aaggtgtcag

SEQ ID NO: 397 - RNA, 10 nt, synthetic construct
  source 1..10: mol_type = other RNA
  misc_feature 1..10: note = Description of sequence: Splice site sequence
aaggtgtctg

SEQ ID NO: 398 - RNA, 10 nt, synthetic construct
  source 1..10: mol_type = other RNA
  misc_feature 1..10: note = Description of sequence: Splice site sequence
aaggtgtgaa

SEQ ID NO: 399 - RNA, 10 nt, synthetic construct
  source 1..10: mol_type = other RNA
  misc_feature 1..10: note = Description of sequence: Splice site sequence
aaggtgtgag

SEQ ID NO: 400 - RNA, 10 nt, synthetic construct
  source 1..10: mol_type = other RNA
  misc_feature 1..10: note = Description of sequence: Splice site sequence
aaggtgtgca

SEQ ID NO: 401 - RNA, 10 nt, synthetic construct
  source 1..10: mol_type = other RNA
  misc_feature 1..10: note = Description of sequence: Splice site sequence
aaggtgtgga

SEQ ID NO: 402 - RNA, 10 nt, synthetic construct
  source 1..10: mol_type = other RNA
  misc_feature 1..10: note = Description of sequence: Splice site sequence
aaggtgtggt

SEQ ID NO: 403 - RNA, 10 nt, synthetic construct
  source 1..10: mol_type = other RNA
  misc_feature 1..10: note = Description of sequence: Splice site sequence
aaggtgtgta

SEQ ID NO: 404 - RNA, 10 nt, synthetic construct
  source 1..10: mol_type = other RNA
  misc_feature 1..10: note = Description of sequence: Splice site sequence
aaggtgtgtc

SEQ ID NO: 405 - RNA, 10 nt, synthetic construct
  source 1..10: mol_type = other RNA
  misc_feature 1..10: note = Description of sequence: Splice site sequence
aaggtgtgtg

SEQ ID NO: 406 - RNA, 10 nt, synthetic construct
  source 1..10: mol_type = other RNA
  misc_feature 1..10: note = Description of sequence: Splice site sequence
aaggtgtgtt

SEQ ID NO: 407 - RNA, 10 nt, synthetic construct
  source 1..10: mol_type = other RNA
  misc_feature 1..10: note = Description of sequence: Splice site sequence
aaggtgttct

SEQ ID NO: 408 - RNA, 10 nt, synthetic construct
  source 1..10: mol_type = other RNA
  misc_feature 1..10: note = Description of sequence: Splice site sequence
aaggtgttgc

SEQ ID NO: 409 - RNA, 10 nt, synthetic construct
  source 1..10: mol_type = other RNA
  misc_feature 1..10: note = Description of sequence: Splice site sequence
aaggtgttgg

SEQ ID NO: 410 - RNA, 10 nt, synthetic construct
  source 1..10: mol_type = other RNA
  misc_feature 1..10: note = Description of sequence: Splice site sequence
aaggtgtttg

SEQ ID NO: 411 - RNA, 10 nt, synthetic construct
  source 1..10: mol_type = other RNA
  misc_feature 1..10: note = Description of sequence: Splice site sequence
aaggttaaaa

SEQ ID NO: 412 - RNA, 10 nt, synthetic construct
  source 1..10: mol_type = other RNA
  misc_feature 1..10: note = Description of sequence: Splice site sequence
aaggttaaca

SEQ ID NO: 413 - RNA, 10 nt, synthetic construct
  source 1..10: mol_type = other RNA
  misc_feature 1..10: note = Description of sequence: Splice site sequence
aaggttaagc

SEQ ID NO: 414 - RNA, 10 nt, synthetic construct
  source 1..10: mol_type = other RNA
  misc_feature 1..10: note = Description of sequence: Splice site sequence
aaggttaatt

SEQ ID NO: 415 - RNA, 10 nt, synthetic construct
  source 1..10: mol_type = other RNA
  misc_feature 1..10: note = Description of sequence: Splice site sequence
aaggttacat

SEQ ID NO: 416 - RNA, 10 nt, synthetic construct
  source 1..10: mol_type = other RNA
  misc_feature 1..10: note = Description of sequence: Splice site sequence
aaggttagaa

SEQ ID NO: 417 - RNA, 10 nt, synthetic construct
  source 1..10: mol_type = other RNA
  misc_feature 1..10: note = Description of sequence: Splice site sequence
aaggttagat

SEQ ID NO: 418 - RNA, 10 nt, synthetic construct
  source 1..10: mol_type = other RNA
  misc_feature 1..10: note = Description of sequence: Splice site sequence
aaggttagca

SEQ ID NO: 419 - RNA, 10 nt, synthetic construct
  source 1..10: mol_type = other RNA
  misc_feature 1..10: note = Description of sequence: Splice site sequence
aaggttagcc

SEQ ID NO: 420 - RNA, 10 nt, synthetic construct
  source 1..10: mol_type = other RNA
  misc_feature 1..10: note = Description of sequence: Splice site sequence
aaggttagga

SEQ ID NO: 421 - RNA, 10 nt, synthetic construct
  source 1..10: mol_type = other RNA
  misc_feature 1..10: note = Description of sequence: Splice site sequence
aaggttaggc

SEQ ID NO: 422 - RNA, 10 nt, synthetic construct
  source 1..10: mol_type = other RNA
  misc_feature 1..10: note = Description of sequence: Splice site sequence
aaggttagta

SEQ ID NO: 423 - RNA, 10 nt, synthetic construct
  source 1..10: mol_type = other RNA
  misc_feature 1..10: note = Description of sequence: Splice site sequence
aaggttagtc

SEQ ID NO: 424 - RNA, 10 nt, synthetic construct
  source 1..10: mol_type = other RNA
  misc_feature 1..10: note = Description of sequence: Splice site sequence
aaggttagtg

SEQ ID NO: 425 - RNA, 10 nt, synthetic construct
  source 1..10: mol_type = other RNA
  misc_feature 1..10: note = Description of sequence: Splice site sequence
aaggttagtt

SEQ ID NO: 426 - RNA, 10 nt, synthetic construct
  source 1..10: mol_type = other RNA
  misc_feature 1..10: note = Description of sequence: Splice site sequence
aaggttatag

SEQ ID NO: 427 - RNA, 10 nt, synthetic construct
  source 1..10: mol_type = other RNA
  misc_feature 1..10: note = Description of sequence: Splice site sequence
aaggttatga

SEQ ID NO: 428 - RNA, 10 nt, synthetic construct
  source 1..10: mol_type = other RNA
  misc_feature 1..10: note = Description of sequence: Splice site sequence
aaggttcaaa

SEQ ID NO: 429 - RNA, 10 nt, synthetic construct
  source 1..10: mol_type = other RNA
  misc_feature 1..10: note = Description of sequence: Splice site sequence
aaggttcaag

SEQ ID NO: 430 - RNA, 10 nt, synthetic construct
  source 1..10: mol_type = other RNA
  misc_feature 1..10: note = Description of sequence: Splice site sequence
aaggttcctt

SEQ ID NO: 431 - RNA, 10 nt, synthetic construct
  source 1..10: mol_type = other RNA
  misc_feature 1..10: note = Description of sequence: Splice site sequence
aaggttcggc

SEQ ID NO: 432 - RNA, 10 nt, synthetic construct
  source 1..10: mol_type = other RNA
  misc_feature 1..10: note = Description of sequence: Splice site sequence
aaggttcgtt

SEQ ID NO: 433 - RNA, 10 nt, synthetic construct
  source 1..10: mol_type = other RNA
  misc_feature 1..10: note = Description of sequence: Splice site sequence
aaggttctaa

SEQ ID NO: 434 - RNA, 10 nt, synthetic construct
  source 1..10: mol_type = other RNA
  misc_feature 1..10: note = Description of sequence: Splice site sequence
aaggttctga

SEQ ID NO: 435 - RNA, 10 nt, synthetic construct
  source 1..10: mol_type = other RNA
  misc_feature 1..10: note = Description of sequence: Splice site sequence
aaggttctta

SEQ ID NO: 436 - RNA, 10 nt, synthetic construct
  source 1..10: mol_type = other RNA
  misc_feature 1..10: note = Description of sequence: Splice site sequence
aaggttgaat

SEQ ID NO: 437 - RNA, 10 nt, synthetic construct
  source 1..10: mol_type = other RNA
  misc_feature 1..10: note = Description of sequence: Splice site sequence
aaggttgact

SEQ ID NO: 438 - RNA, 10 nt, synthetic construct
  source 1..10: mol_type = other RNA
  misc_feature 1..10: note = Description of sequence: Splice site sequence
aaggttgagg

SEQ ID NO: 439 - RNA, 10 nt, synthetic construct
  source 1..10: mol_type = other RNA
  misc_feature 1..10: note = Description of sequence: Splice site sequence
aaggttgagt

SEQ ID NO: 440 - RNA, 10 nt, synthetic construct
  source 1..10: mol_type = other RNA
  misc_feature 1..10: note = Description of sequence: Splice site sequence
aaggttgata

SEQ ID NO: 441 - RNA, 10 nt, synthetic construct
  source 1..10: mol_type = other RNA
  misc_feature 1..10: note = Description of sequence: Splice site sequence
aaggttgcac

SEQ ID NO: 442 - RNA, 10 nt, synthetic construct
  source 1..10: mol_type = other RNA
  misc_feature 1..10: note = Description of sequence: Splice site sequence
aaggttgctg

SEQ ID NO: 443 - RNA, 10 nt, synthetic construct
  source 1..10: mol_type = other RNA
  misc_feature 1..10: note = Description of sequence: Splice site sequence
aaggttggaa

SEQ ID NO: 444 - RNA, 10 nt, synthetic construct
  source 1..10: mol_type = other RNA
  misc_feature 1..10: note = Description of sequence: Splice site sequence
aaggttggca

SEQ ID NO: 445 - RNA, 10 nt, synthetic construct
  source 1..10: mol_type = other RNA
  misc_feature 1..10: note = Description of sequence: Splice site sequence
aaggttggga

SEQ ID NO: 446 - RNA, 10 nt, synthetic construct
  source 1..10: mol_type = other RNA
  misc_feature 1..10: note = Description of sequence: Splice site sequence
aaggttgggg

SEQ ID NO: 447 - RNA, 10 nt, synthetic construct
  source 1..10: mol_type = other RNA
  misc_feature 1..10: note = Description of sequence: Splice site sequence
aaggttggta

SEQ ID NO: 448 - RNA, 10 nt, synthetic construct
  source 1..10: mol_type = other RNA
  misc_feature 1..10: note = Description of sequence: Splice site sequence
aaggttggtc

SEQ ID NO: 449 - RNA, 10 nt, synthetic construct
  source 1..10: mol_type = other RNA
  misc_feature 1..10: note = Description of sequence: Splice site sequence
aaggttggtg

SEQ ID NO: 450 - RNA, 10 nt, synthetic construct
  source 1..10: mol_type = other RNA
  misc_feature 1..10: note = Description of sequence: Splice site sequence
aaggttggtt

SEQ ID NO: 451 - RNA, 10 nt, synthetic construct
  source 1..10: mol_type = other RNA
  misc_feature 1..10: note = Description of sequence: Splice site sequence
aaggttgtaa

SEQ ID NO: 452 - RNA, 10 nt, synthetic construct
  source 1..10: mol_type = other RNA
  misc_feature 1..10: note = Description of sequence: Splice site sequence
aaggttgtcc

SEQ ID NO: 453 - RNA, 10 nt, synthetic construct
  source 1..10: mol_type = other RNA
  misc_feature 1..10: note = Description of sequence: Splice site sequence
aaggttgtgc

SEQ ID NO: 454 - RNA, 10 nt, synthetic construct
  source 1..10: mol_type = other RNA
  misc_feature 1..10: note = Description of sequence: Splice site sequence
aaggttgtta

SEQ ID NO: 455 - RNA, 10 nt, synthetic construct
  source 1..10: mol_type = other RNA
  misc_feature 1..10: note = Description of sequence: Splice site sequence
aaggtttacc

SEQ ID NO: 456 - RNA, 10 nt, synthetic construct
  source 1..10: mol_type = other RNA
  misc_feature 1..10: note = Description of sequence: Splice site sequence
aaggtttata

SEQ ID NO: 457 - RNA, 10 nt, synthetic construct
  source 1..10: mol_type = other RNA
  misc_feature 1..10: note = Description of sequence: Splice site sequence
aaggtttatt

SEQ ID NO: 458 - RNA, 10 nt, synthetic construct
  source 1..10: mol_type = other RNA
  misc_feature 1..10: note = Description of sequence: Splice site sequence
aaggtttcct

SEQ ID NO: 459 - RNA, 10 nt, synthetic construct
  source 1..10: mol_type = other RNA
  misc_feature 1..10: note = Description of sequence: Splice site sequence
aaggtttcgt

SEQ ID NO: 460 - RNA, 10 nt, synthetic construct
  source 1..10: mol_type = other RNA
  misc_feature 1..10: note = Description of sequence: Splice site sequence
aaggtttgag

SEQ ID NO: 461 - RNA, 10 nt, synthetic construct
  source 1..10: mol_type = other RNA
  misc_feature 1..10: note = Description of sequence: Splice site sequence
aaggtttgca

SEQ ID NO: 462 - RNA, 10 nt, synthetic construct
  source 1..10: mol_type = other RNA
  misc_feature 1..10: note = Description of sequence: Splice site sequence
aaggtttgcc

SEQ ID NO: 463 - RNA, 10 nt, synthetic construct
  source 1..10: mol_type = other RNA
  misc_feature 1..10: note = Description of sequence: Splice site sequence
aaggtttgct

SEQ ID NO: 464 - RNA, 10 nt, synthetic construct
  source 1..10: mol_type = other RNA
  misc_feature 1..10: note = Description of sequence: Splice site sequence
aaggtttgga

SEQ ID NO: 465 - RNA, 10 nt, synthetic construct
  source 1..10: mol_type = other RNA
  misc_feature 1..10: note = Description of sequence: Splice site sequence
aaggtttggt

SEQ ID NO: 466 - RNA, 10 nt, synthetic construct
  source 1..10: mol_type = other RNA
  misc_feature 1..10: note = Description of sequence: Splice site sequence
aaggtttgta

SEQ ID NO: 467 - RNA, 10 nt, synthetic construct
  source 1..10: mol_type = other RNA
  misc_feature 1..10: note = Description of sequence: Splice site sequence
aaggtttgtc

SEQ ID NO: 468 - RNA, 10 nt, synthetic construct
  source 1..10: mol_type = other RNA
  misc_feature 1..10: note = Description of sequence: Splice site sequence
aaggtttgtg

SEQ ID NO: 469 - RNA, 10 nt, synthetic construct
  source 1..10: mol_type = other RNA
  misc_feature 1..10: note = Description of sequence: Splice site sequence
aaggttttaa

SEQ ID NO: 470 - RNA, 10 nt, synthetic construct
  source 1..10: mol_type = other RNA
  misc_feature 1..10: note = Description of sequence: Splice site sequence
aaggttttca

SEQ ID NO: 471 - RNA, 10 nt, synthetic construct
  source 1..10: mol_type = other RNA
  misc_feature 1..10: note = Description of sequence: Splice site sequence
aaggttttcg

SEQ ID NO: 472 - RNA, 10 nt, synthetic construct
  source 1..10: mol_type = other RNA
  misc_feature 1..10: note = Description of sequence: Splice site sequence
aaggttttgc

SEQ ID NO: 473 - RNA, 10 nt, synthetic construct
  source 1..10: mol_type = other RNA
  misc_feature 1..10: note = Description of sequence: Splice site sequence
aaggttttgt

SEQ ID NO: 474 - RNA, 10 nt, synthetic construct
  source 1..10: mol_type = other RNA
  misc_feature 1..10: note = Description of sequence: Splice site sequence
aaggtttttt

SEQ ID NO: 475 - RNA, 10 nt, synthetic construct
  source 1..10: mol_type = other RNA
  misc_feature 1..10: note = Description of sequence: Splice site sequence
aatgcaagta

SEQ ID NO: 476 - RNA, 10 nt, synthetic construct
  source 1..10: mol_type = other RNA
  misc_feature 1..10: note = Description of sequence: Splice site sequence
aatgcaagtc

SEQ ID NO: 477 - RNA, 10 nt, synthetic construct
  source 1..10: mol_type = other RNA
  misc_feature 1..10: note = Description of sequence: Splice site sequence
aatgtaaaca

SEQ ID NO: 478 - RNA, 10 nt, synthetic construct
  source 1..10: mol_type = other RNA
  misc_feature 1..10: note = Description of sequence: Splice site sequence
aatgtaaata

SEQ ID NO: 479 - RNA, 10 nt, synthetic construct
  source 1..10: mol_type = other RNA
  misc_feature 1..10: note = Description of sequence: Splice site sequence
aatgtaaatc

SEQ ID NO: 480 - RNA, 10 nt, synthetic construct
  source 1..10: mol_type = other RNA
  misc_feature 1..10: note = Description of sequence: Splice site sequence
aatgtaaatg

SEQ ID NO: 481 - RNA, 10 nt, synthetic construct
  source 1..10: mol_type = other RNA
  misc_feature 1..10: note = Description of sequence: Splice site sequence
aatgtaaatt

SEQ ID NO: 482 - RNA, 10 nt, synthetic construct
  source 1..10: mol_type = other RNA
  misc_feature 1..10: note = Description of sequence: Splice site sequence
aatgtaacta

SEQ ID NO: 483 - RNA, 10 nt, synthetic construct
  source 1..10: mol_type = other RNA
  misc_feature 1..10: note = Description of sequence: Splice site sequence
aatgtaagaa

SEQ ID NO: 484 - RNA, 10 nt, synthetic construct
  source 1..10: mol_type = other RNA
  misc_feature 1..10: note = Description of sequence: Splice site sequence
aatgtaagag

SEQ ID NO: 485 - RNA, 10 nt, synthetic construct
  source 1..10: mol_type = other RNA
  misc_feature 1..10: note = Description of sequence: Splice site sequence
aatgtaagat

SEQ ID NO: 486 - RNA, 10 nt, synthetic construct
  source 1..10: mol_type = other RNA
  misc_feature 1..10: note = Description of sequence: Splice site sequence
aatgtaagcc

SEQ ID NO: 487 - RNA, 10 nt, synthetic construct
  source 1..10: mol_type = other RNA
  misc_feature 1..10: note = Description of sequence: Splice site sequence
aatgtaagct

SEQ ID NO: 488 - RNA, 10 nt, synthetic construct
  source 1..10: mol_type = other RNA
  misc_feature 1..10: note = Description of sequence: Splice site sequence
aatgtaagga

SEQ ID NO: 489 - RNA, 10 nt, synthetic construct
  source 1..10: mol_type = other RNA
  misc_feature 1..10: note = Description of sequence: Splice site sequence
aatgtaagta

SEQ ID NO: 490 - RNA, 10 nt, synthetic construct
  source 1..10: mol_type = other RNA
  misc_feature 1..10: note = Description of sequence: Splice site sequence
aatgtaagtc

SEQ ID NO: 491 - RNA, 10 nt, synthetic construct
  source 1..10: mol_type = other RNA
  misc_feature 1..10: note = Description of sequence: Splice site sequence
aatgtaagtg

SEQ ID NO: 492 - RNA, 10 nt, synthetic construct
  source 1..10: mol_type = other RNA
  misc_feature 1..10: note = Description of sequence: Splice site sequence
aatgtaagtt

SEQ ID NO: 493 - RNA, 10 nt, synthetic construct
  source 1..10: mol_type = other RNA
  misc_feature 1..10: note = Description of sequence: Splice site sequence
aatgtaatca

SEQ ID NO: 494 - RNA, 10 nt, synthetic construct
  source 1..10: mol_type = other RNA
  misc_feature 1..10: note = Description of sequence: Splice site sequence
aatgtaatga

SEQ ID NO: 495 - RNA, 10 nt, synthetic construct
  source 1..10: mol_type = other RNA
  misc_feature 1..10: note = Description of sequence: Splice site sequence
aatgtaatgt

SEQ ID NO: 496 - RNA, 10 nt, synthetic construct
  source 1..10: mol_type = other RNA
  misc_feature 1..10: note = Description of sequence: Splice site sequence
aatgtacatc

SEQ ID NO: 497 - RNA, 10 nt, synthetic construct
  source 1..10: mol_type = other RNA
  misc_feature 1..10: note = Description of sequence: Splice site sequence
aatgtacatg

SEQ ID NO: 498 - RNA, 10 nt, synthetic construct
  source 1..10: mol_type = other RNA
  misc_feature 1..10: note = Description of sequence: Splice site sequence
aatgtacgat

SEQ ID NO: 499 - RNA, 10 nt, synthetic construct
  source 1..10: mol_type = other RNA
  misc_feature 1..10: note = Description of sequence: Splice site sequence
aatgtacgta

SEQ ID NO: 500 - RNA, 10 nt, synthetic construct
  source 1..10: mol_type = other RNA
  misc_feature 1..10: note = Description of sequence: Splice site sequence
aatgtacgtc

SEQ ID NO: 501 - RNA, 10 nt, synthetic construct
  source 1..10: mol_type = other RNA
  misc_feature 1..10: note = Description of sequence: Splice site sequence
aatgtacgtg

SEQ ID NO: 502 - RNA, 10 nt, synthetic construct
  source 1..10: mol_type = other RNA
  misc_feature 1..10: note = Description of sequence: Splice site sequence
aatgtactct

SEQ ID NO: 503 - RNA, 10 nt, synthetic construct
  source 1..10: mol_type = other RNA
  misc_feature 1..10: note = Description of sequence: Splice site sequence
aatgtaggca

SEQ ID NO: 504 - RNA, 10 nt, synthetic construct
  source 1..10: mol_type = other RNA
  misc_feature 1..10: note = Description of sequence: Splice site sequence
aatgtaggtt

SEQ ID NO: 505 - RNA, 10 nt, synthetic construct
  source 1..10: mol_type = other RNA
  misc_feature 1..10: note = Description of sequence: Splice site sequence
aatgtatcta

SEQ ID NO: 506 - RNA, 10 nt, synthetic construct
  source 1..10: mol_type = other RNA
  misc_feature 1..10: note = Description of sequence: Splice site sequence
aatgtatgaa

SEQ ID NO: 507 - RNA, 10 nt, synthetic construct
  source 1..10: mol_type = other RNA
  misc_feature 1..10: note = Description of sequence: Splice site sequence
aatgtatgta

SEQ ID NO: 508 - RNA, 10 nt, synthetic construct
  source 1..10: mol_type = other RNA
  misc_feature 1..10: note = Description of sequence: Splice site sequence
aatgtatgtg

SEQ ID NO: 509 - RNA, 10 nt, synthetic construct
  source 1..10: mol_type = other RNA
  misc_feature 1..10: note = Description of sequence: Splice site sequence
aatgtatgtt

SEQ ID NO: 510 - RNA, 10 nt, synthetic construct
  source 1..10: mol_type = other RNA
  misc_feature 1..10: note = Description of sequence: Splice site sequence
aatgtcagag

SEQ ID NO: 511 - RNA, 10 nt, synthetic construct
  source 1..10: mol_type = other RNA
  misc_feature 1..10: note = Description of sequence: Splice site sequence
aatgtcagat

SEQ ID NO: 512 - RNA, 10 nt, synthetic construct
  source 1..10: mol_type = other RNA
  misc_feature 1..10: note = Description of sequence: Splice site sequence
aatgtcagct

SEQ ID NO: 513 - RNA, 10 nt, synthetic construct
  source 1..10: mol_type = other RNA
  misc_feature 1..10: note = Description of sequence: Splice site sequence
aatgtcagta

SEQ ID NO: 514 - RNA, 10 nt, synthetic construct
  source 1..10: mol_type = other RNA
  misc_feature 1..10: note = Description of sequence: Splice site sequence
aatgtcagtc

SEQ ID NO: 515 - RNA, 10 nt, synthetic construct
  source 1..10: mol_type = other RNA
  misc_feature 1..10: note = Description of sequence: Splice site sequence
aatgtcagtg

SEQ ID NO: 516 - RNA, 10 nt, synthetic construct
  source 1..10: mol_type = other RNA
  misc_feature 1..10: note = Description of sequence: Splice site sequence
aatgtcagtt

SEQ ID NO: 517 - RNA, 10 nt, synthetic construct
  source 1..10: mol_type = other RNA
  misc_feature 1..10: note = Description of sequence: Splice site sequence
aatgtcggta

SEQ ID NO: 518 - RNA, 10 nt, synthetic construct
  source 1..10: mol_type = other RNA
  misc_feature 1..10: note = Description of sequence: Splice site sequence
aatgtctgtt

SEQ ID NO: 519 - RNA, 10 nt, synthetic construct
  source 1..10: mol_type = other RNA
  misc_feature 1..10: note = Description of sequence: Splice site sequence
aatgtgagaa

SEQ ID NO: 520 - RNA, 10 nt, synthetic construct
  source 1..10: mol_type = other RNA
  misc_feature 1..10: note = Description of sequence: Splice site sequence
aatgtgagca

SEQ ID NO: 521 - RNA, 10 nt, synthetic construct
  source 1..10: mol_type = other RNA
  misc_feature 1..10: note = Description of sequence: Splice site sequence
aatgtgagcc

SEQ ID NO: 522 - RNA, 10 nt, synthetic construct
  source 1..10: mol_type = other RNA
  misc_feature 1..10: note = Description of sequence: Splice site sequence
aatgtgagga

SEQ ID NO: 523 - RNA, 10 nt, synthetic construct
  source 1..10: mol_type = other RNA
  misc_feature 1..10: note = Description of sequence: Splice site sequence
aatgtgagta

SEQ ID NO: 524 - RNA, 10 nt, synthetic construct
  source 1..10: mol_type = other RNA
  misc_feature 1..10: note = Description of sequence: Splice site sequence
aatgtgagtc

SEQ ID NO: 525 - RNA, 10 nt, synthetic construct
  source 1..10: mol_type = other RNA
  misc_feature 1..10: note = Description of sequence: Splice site sequence
aatgtgagtg

SEQ ID NO: 526 - RNA, 10 nt, synthetic construct
  source 1..10: mol_type = other RNA
  misc_feature 1..10: note = Description of sequence: Splice site sequence
aatgtgagtt

SEQ ID NO: 527 - RNA, 10 nt, synthetic construct
  source 1..10: mol_type = other RNA
  misc_feature 1..10: note = Description of sequence: Splice site sequence
aatgtgatat

SEQ ID NO: 528 - RNA, 10 nt, synthetic construct
  source 1..10: mol_type = other RNA
  misc_feature 1..10: note = Description of sequence: Splice site sequence
aatgtgcata

SEQ ID NO: 529 - RNA, 10 nt, synthetic construct
  source 1..10: mol_type = other RNA
  misc_feature 1..10: note = Description of sequence: Splice site sequence
aatgtgcgta

SEQ ID NO: 530 - RNA, 10 nt, synthetic construct
  source 1..10: mol_type = other RNA
  misc_feature 1..10: note = Description of sequence: Splice site sequence
aatgtgcgtc

SEQ ID NO: 531 - RNA, 10 nt, synthetic construct
  source 1..10: mol_type = other RNA
  misc_feature 1..10: note = Description of sequence: Splice site sequence
aatgtgggac

SEQ ID NO: 532 - RNA, 10 nt, synthetic construct
  source 1..10: mol_type = other RNA
  misc_feature 1..10: note = Description of sequence: Splice site sequence
aatgtgggtc

SEQ ID NO: 533 - RNA, 10 nt, synthetic construct
  source 1..10: mol_type = other RNA
  misc_feature 1..10: note = Description of sequence: Splice site sequence
aatgtgggtg

SEQ ID NO: 534 - RNA, 10 nt, synthetic construct
  source 1..10: mol_type = other RNA
  misc_feature 1..10: note = Description of sequence: Splice site sequence
aatgtggttt

SEQ ID NO: 535 - RNA, 10 nt, synthetic construct
  source 1..10: mol_type = other RNA
  misc_feature 1..10: note = Description of sequence: Splice site sequence
aatgtgtgta

SEQ ID NO: 536 - RNA, 10 nt, synthetic construct
  source 1..10: mol_type = other RNA
  misc_feature 1..10: note = Description of sequence: Splice site sequence
aatgttaagt

SEQ ID NO: 537 - RNA, 10 nt, synthetic construct
  source 1..10: mol_type = other RNA
  misc_feature 1..10: note = Description of sequence: Splice site sequence
aatgttagaa

SEQ ID NO: 538 - RNA, 10 nt, synthetic construct
  source 1..10: mol_type = other RNA
  misc_feature 1..10: note = Description of sequence: Splice site sequence
aatgttagat

SEQ ID NO: 539 - RNA, 10 nt, synthetic construct
  source 1..10: mol_type = other RNA
  misc_feature 1..10: note = Description of sequence: Splice site sequence
aatgttagta

SEQ ID NO: 540 - RNA, 10 nt, synthetic construct
  source 1..10: mol_type = other RNA
  misc_feature 1..10: note = Description of sequence: Splice site sequence
aatgttggtg

SEQ ID NO: 541 - RNA, 10 nt, synthetic construct
  source 1..10: mol_type = other RNA
  misc_feature 1..10: note = Description of sequence: Splice site sequence
acagcaagta

SEQ ID NO: 542 - RNA, 10 nt, synthetic construct
  source 1..10: mol_type = other RNA
  misc_feature 1..10: note = Description of sequence: Splice site sequence
acagtaaata

SEQ ID NO: 543 - RNA, 10 nt, synthetic construct
  source 1..10: mol_type = other RNA
  misc_feature 1..10: note = Description of sequence: Splice site sequence
acagtaaatg

SEQ ID NO: 544 - RNA, 10 nt, synthetic construct
  source 1..10: mol_type = other RNA
  misc_feature 1..10: note = Description of sequence: Splice site sequence
acagtaagaa

SEQ ID NO: 545 - RNA, 10 nt, synthetic construct
  source 1..10: mol_type = other RNA
  misc_feature 1..10: note = Description of sequence: Splice site sequence
acagtaagca

SEQ ID NO: 546 - RNA, 10 nt, synthetic construct
  source 1..10: mol_type = other RNA
  misc_feature 1..10: note = Description of sequence: Splice site sequence
acagtaagta

SEQ ID NO: 547 - RNA, 10 nt, synthetic construct
  source 1..10: mol_type = other RNA
  misc_feature 1..10: note = Description of sequence: Splice site sequence
acagtaagtc

SEQ ID NO: 548 - RNA, 10 nt, synthetic construct
  source 1..10: mol_type = other RNA
  misc_feature 1..10: note = Description of sequence: Splice site sequence
acagtaagtg

SEQ ID NO: 549 - RNA, 10 nt, synthetic construct
  source 1..10: mol_type = other RNA
  misc_feature 1..10: note = Description of sequence: Splice site sequence
acagtaagtt

SEQ ID NO: 550 - RNA, 10 nt, synthetic construct
  source 1..10: mol_type = other RNA
  misc_feature 1..10: note = Description of sequence: Splice site sequence
acagtacgta

SEQ ID NO: 551 - RNA, 10 nt, synthetic construct
  source 1..10: mol_type = other RNA
  misc_feature 1..10: note = Description of sequence: Splice site sequence
acagtaggtg

SEQ ID NO: 552 - RNA, 10 nt, synthetic construct
  source 1..10: mol_type = other RNA
  misc_feature 1..10: note = Description of sequence: Splice site sequence
acagtataac

SEQ ID NO: 553 - RNA, 10 nt, synthetic construct
  source 1..10: mol_type = other RNA
  misc_feature 1..10: note = Description of sequence: Splice site sequence
acagtatgta

SEQ ID NO: 554 - RNA, 10 nt, synthetic construct
  source 1..10: mol_type = other RNA
  misc_feature 1..10: note = Description of sequence: Splice site sequence
acagtcagtt

SEQ ID NO: 555 - RNA, 10 nt, synthetic construct
  source 1..10: mol_type = other RNA
  misc_feature 1..10: note = Description of sequence: Splice site sequence
acagtgagaa

SEQ ID NO: 556 - RNA, 10 nt, synthetic construct
  source 1..10: mol_type = other RNA
  misc_feature 1..10: note = Description of sequence: Splice site sequence
acagtgagcc

SEQ ID NO: 557 - RNA, 10 nt, synthetic construct
  source 1..10: mol_type = other RNA
  misc_feature 1..10: note = Description of sequence: Splice site sequence
acagtgagct

SEQ ID NO: 558 - RNA, 10 nt, synthetic construct
  source 1..10: mol_type = other RNA
  misc_feature 1..10: note = Description of sequence: Splice site sequence
acagtgagga

SEQ ID NO: 559 - RNA, 10 nt, synthetic construct
  source 1..10: mol_type = other RNA
  misc_feature 1..10: note = Description of sequence: Splice site sequence
acagtgaggt

SEQ ID NO: 560 - RNA, 10 nt, synthetic construct
  source 1..10: mol_type = other RNA
  misc_feature 1..10: note = Description of sequence: Splice site sequence
acagtgagta

SEQ ID NO: 561 - RNA, 10 nt, synthetic construct
  source 1..10: mol_type = other RNA
  misc_feature 1..10: note = Description of sequence: Splice site sequence
acagtgagtc

SEQ ID NO: 562 - RNA, 10 nt, synthetic construct
  source 1..10: mol_type = other RNA
  misc_feature 1..10: note = Description of sequence: Splice site sequence
acagtgagtg

SEQ ID NO: 563 - RNA, 10 nt, synthetic construct
  source 1..10: mol_type = other RNA
  misc_feature 1..10: note = Description of sequence: Splice site sequence
acagtgagtt

SEQ ID NO: 564 - RNA, 10 nt, synthetic construct
  source 1..10: mol_type = other RNA
  misc_feature 1..10: note = Description of sequence: Splice site sequence
acagtgggta

SEQ ID NO: 565 - RNA, 10 nt, synthetic construct
  source 1..10: mol_type = other RNA
  misc_feature 1..10: note = Description of sequence: Splice site sequence
acagtgggtt

SEQ ID NO: 566 - RNA, 10 nt, synthetic construct
  source 1..10: mol_type = other RNA
  misc_feature 1..10: note = Description of sequence: Splice site sequence
acagtgtaaa

SEQ ID NO: 567 - RNA, 10 nt, synthetic construct
  source 1..10: mol_type = other RNA
  misc_feature 1..10: note = Description of sequence: Splice site sequence
acagttaagc

SEQ ID NO: 568 - RNA, 10 nt, synthetic construct
  source 1..10: mol_type = other RNA
  misc_feature 1..10: note = Description of sequence: Splice site sequence
acagttaagt

SEQ ID NO: 569 - RNA, 10 nt, synthetic construct
  source 1..10: mol_type = other RNA
  misc_feature 1..10: note = Description of sequence: Splice site sequence
acagttatgt

SEQ ID NO: 570 - RNA, 10 nt, synthetic construct
  source 1..10: mol_type = other RNA
  misc_feature 1..10: note = Description of sequence: Splice site sequence
acagttgagt

SEQ ID NO: 571 - RNA, 10 nt, synthetic construct
  source 1..10: mol_type = other RNA
  misc_feature 1..10: note = Description of sequence: Splice site sequence
acagttgtga

SEQ ID NO: 572 - RNA, 10 nt, synthetic construct
  source 1..10: mol_type = other RNA
  misc_feature 1..10: note = Description of sequence: Splice site sequence
accgtaagta

SEQ ID NO: 573 - RNA, 10 nt, synthetic construct
  source 1..10: mol_type = other RNA
  misc_feature 1..10: note = Description of sequence: Splice site sequence
accgtgagaa

SEQ ID NO: 574 - RNA, 10 nt, synthetic construct
  source 1..10: mol_type = other RNA
  misc_feature 1..10: note = Description of sequence: Splice site sequence
accgtgagca

SEQ ID NO: 575 - RNA, 10 nt, synthetic construct
  source 1..10: mol_type = other RNA
  misc_feature 1..10: note = Description of sequence: Splice site sequence
accgtgagtt

SEQ ID NO: 576 - RNA, 10 nt, synthetic construct
  source 1..10: mol_type = other RNA
  misc_feature 1..10: note = Description of sequence: Splice site sequence
accgtgggtg

SEQ ID NO: 577 - RNA, 10 nt, synthetic construct
  source 1..10: mol_type = other RNA
  misc_feature 1..10: note = Description of sequence: Splice site sequence
acggtaaaac

SEQ ID NO: 578 - RNA, 10 nt, synthetic construct
  source 1..10: mol_type = other RNA
  misc_feature 1..10: note = Description of sequence: Splice site sequence
acggtaacta

SEQ ID NO: 579 - RNA, 10 nt, synthetic construct
  source 1..10: mol_type = other RNA
  misc_feature 1..10: note = Description of sequence: Splice site sequence
acggtaagta

SEQ ID NO: 580 - RNA, 10 nt, synthetic construct
  source 1..10: mol_type = other RNA
  misc_feature 1..10: note = Description of sequence: Splice site sequence
acggtaagtg

SEQ ID NO: 581 - RNA, 10 nt, synthetic construct
  source 1..10: mol_type = other RNA
  misc_feature 1..10: note = Description of sequence: Splice site sequence
acggtaagtt

SEQ ID NO: 582 - RNA, 10 nt, synthetic construct
  source 1..10: mol_type = other RNA
  misc_feature 1..10: note = Description of sequence: Splice site sequence
acggtaatta

SEQ ID NO: 583 - RNA, 10 nt, synthetic construct
  source 1..10: mol_type = other RNA
  misc_feature 1..10: note = Description of sequence: Splice site sequence
acggtaattt

SEQ ID NO: 584 - RNA, 10 nt, synthetic construct
  source 1..10: mol_type = other RNA
  misc_feature 1..10: note = Description of sequence: Splice site sequence
acggtacaat

SEQ ID NO: 585 - RNA, 10 nt, synthetic construct
  source 1..10: mol_type = other RNA
  misc_feature 1..10: note = Description of sequence: Splice site sequence
acggtacagt

SEQ ID NO: 586 - RNA, 10 nt, synthetic construct
  source 1..10: mol_type = other RNA
  misc_feature 1..10: note = Description of sequence: Splice site sequence
acggtaccag

SEQ ID NO: 587 - RNA, 10 nt, synthetic construct
  source 1..10: mol_type = other RNA
  misc_feature 1..10: note = Description of sequence: Splice site sequence
acggtacggt

SEQ ID NO: 588 - RNA, 10 nt, synthetic construct
  source 1..10: mol_type = other RNA
  misc_feature 1..10: note = Description of sequence: Splice site sequence
acggtacgta

SEQ ID NO: 589 - RNA, 10 nt, synthetic construct
  source 1..10: mol_type = other RNA
  misc_feature 1..10: note = Description of sequence: Splice site sequence
acggtaggaa

SEQ ID NO: 590 - RNA, 10 nt, synthetic construct
  source 1..10: mol_type = other RNA
  misc_feature 1..10: note = Description of sequence: Splice site sequence
acggtaggag

SEQ ID NO: 591 - RNA, 10 nt, synthetic construct
  source 1..10: mol_type = other RNA
  misc_feature 1..10: note = Description of sequence: Splice site sequence
acggtaggtg

SEQ ID NO: 592 - RNA, 10 nt, synthetic construct
  source 1..10: mol_type = other RNA
  misc_feature 1..10: note = Description of sequence: Splice site sequence
acggtagtaa

SEQ ID NO: 593 - RNA, 10 nt, synthetic construct
  source 1..10: mol_type = other RNA
  misc_feature 1..10: note = Description of sequence: Splice site sequence
acggtataat

SEQ ID NO: 594 - RNA, 10 nt, synthetic construct
  source 1..10: mol_type = other RNA
  misc_feature 1..10: note = Description of sequence: Splice site sequence
acggtatgac

SEQ ID NO: 595 - RNA, 10 nt, synthetic construct
  source 1..10: mol_type = other RNA
  misc_feature 1..10: note = Description of sequence: Splice site sequence
acggtatgcg

SEQ ID NO: 596 - RNA, 10 nt, synthetic construct
  source 1..10: mol_type = other RNA
  misc_feature 1..10: note = Description of sequence: Splice site sequence
acggtatgta

SEQ ID NO: 597 - RNA, 10 nt, synthetic construct
  source 1..10: mol_type = other RNA
  misc_feature 1..10: note = Description of sequence: Splice site sequence
acggtatgtc

SEQ ID NO: 598 - RNA, 10 nt, synthetic construct
  source 1..10: mol_type = other RNA
  misc_feature 1..10: note = Description of sequence: Splice site sequence
acggtgaaac

SEQ ID NO: 599 - RNA, 10 nt, synthetic construct
  source 1..10: mol_type = other RNA
  misc_feature 1..10: note = Description of sequence: Splice site sequence
acggtgaagt

SEQ ID NO: 600 - RNA, 10 nt, synthetic construct
  source 1..10: mol_type = other RNA
  misc_feature 1..10: note = Description of sequence: Splice site sequence
acggtgaatc

SEQ ID NO: 601 - RNA, 10 nt, synthetic construct
  source 1..10: mol_type = other RNA
  misc_feature 1..10: note = Description of sequence: Splice site sequence
acggtgacag

SEQ ID NO: 602 - RNA, 10 nt, synthetic construct
  source 1..10: mol_type = other RNA
  misc_feature 1..10: note = Description of sequence: Splice site sequence
acggtgacca

SEQ ID NO: 603 - RNA, 10 nt, synthetic construct
  source 1..10: mol_type = other RNA
  misc_feature 1..10: note = Description of sequence: Splice site sequence
acggtgagaa

SEQ ID NO: 604 - RNA, 10 nt, synthetic construct
  source 1..10: mol_type = other RNA
  misc_feature 1..10: note = Description of sequence: Splice site sequence
acggtgagat

SEQ ID NO: 605 - RNA, 10 nt, synthetic construct
  source 1..10: mol_type = other RNA
  misc_feature 1..10: note = Description of sequence: Splice site sequence
acggtgagcc

SEQ ID NO: 606 - RNA, 10 nt, synthetic construct
  source 1..10: mol_type = other RNA
  misc_feature 1..10: note = Description of sequence: Splice site sequence
acggtgagta

SEQ ID NO: 607 - RNA, 10 nt, synthetic construct
  source 1..10: mol_type = other RNA
  misc_feature 1..10: note = Description of sequence: Splice site sequence
acggtgagtg

SEQ ID NO: 608 - RNA, 10 nt, synthetic construct
  source 1..10: mol_type = other RNA
  misc_feature 1..10: note = Description of sequence: Splice site sequence
acggtgagtt

SEQ ID NO: 609 - RNA, 10 nt, synthetic construct
  source 1..10: mol_type = other RNA
  misc_feature 1..10: note = Description of sequence: Splice site sequence
acggtgcgtg

SEQ ID NO: 610 - RNA, 10 nt, synthetic construct
  source 1..10: mol_type = other RNA
  misc_feature 1..10: note = Description of sequence: Splice site sequence
acggtggcac

SEQ ID NO: 611 - RNA, 10 nt, synthetic construct
  source 1..10: mol_type = other RNA
  misc_feature 1..10: note = Description of sequence: Splice site sequence
acggtggggc

SEQ ID NO: 612 - RNA, 10 nt, synthetic construct
  source 1..10: mol_type = other RNA
  misc_feature 1..10: note = Description of sequence: Splice site sequence
acggtgggtg

SEQ ID NO: 613 - RNA, 10 nt, synthetic construct
  source 1..10: mol_type = other RNA
  misc_feature 1..10: note = Description of sequence: Splice site sequence
acggtgtagt

SEQ ID NO: 614 - RNA, 10 nt, synthetic construct
  source 1..10: mol_type = other RNA
  misc_feature 1..10: note = Description of sequence: Splice site sequence
acggtgtcac

SEQ ID NO: 615 - RNA, 10 nt, synthetic construct
  source 1..10: mol_type = other RNA
  misc_feature 1..10: note = Description of sequence: Splice site sequence
acggtgtgta

SEQ ID NO: 616 - RNA, 10 nt, synthetic construct
  source 1..10: mol_type = other RNA
  misc_feature 1..10: note = Description of sequence: Splice site sequence
acggtgtgtt

SEQ ID NO: 617 - RNA, 10 nt, synthetic construct
  source 1..10: mol_type = other RNA
  misc_feature 1..10: note = Description of sequence: Splice site sequence
acggttagtg

SEQ ID NO: 618 - RNA, 10 nt, synthetic construct
  source 1..10: mol_type = other RNA
  misc_feature 1..10: note = Description of sequence: Splice site sequence
acggttagtt

SEQ ID NO: 619 - RNA, 10 nt, synthetic construct
  source 1..10: mol_type = other RNA
  misc_feature 1..10: note = Description of sequence: Splice site sequence
acggttcaat

SEQ ID NO: 620 - RNA, 10 nt, synthetic construct
  source 1..10: mol_type = other RNA
  misc_feature 1..10: note = Description of sequence: Splice site sequence
actgtaaata

SEQ ID NO: 621 - RNA, 10 nt, synthetic construct
  source 1..10: mol_type = other RNA
  misc_feature 1..10: note = Description of sequence: Splice site sequence
actgtaagaa

SEQ ID NO: 622 - RNA, 10 nt, synthetic construct
  source 1..10: mol_type = other RNA
  misc_feature 1..10: note = Description of sequence: Splice site sequence
actgtaagac

SEQ ID NO: 623 - RNA, 10 nt, synthetic construct
  source 1..10: mol_type = other RNA
  misc_feature 1..10: note = Description of sequence: Splice site sequence
actgtaagca

SEQ ID NO: 624 - RNA, 10 nt, synthetic construct
  source 1..10: mol_type = other RNA
  misc_feature 1..10: note = Description of sequence: Splice site sequence
actgtaagct

SEQ ID NO: 625 - RNA, 10 nt, synthetic construct
  source 1..10: mol_type = other RNA
  misc_feature 1..10: note = Description of sequence: Splice site sequence
actgtaagta

SEQ ID NO: 626 - RNA, 10 nt, synthetic construct
  source 1..10: mol_type = other RNA
  misc_feature 1..10: note = Description of sequence: Splice site sequence
actgtaagtc

SEQ ID NO: 627 - RNA, 10 nt, synthetic construct
  source 1..10: mol_type = other RNA
  misc_feature 1..10: note = Description of sequence: Splice site sequence
actgtaagtt

SEQ ID NO: 628 - RNA, 10 nt, synthetic construct
  source 1..10: mol_type = other RNA
  misc_feature 1..10: note = Description of sequence: Splice site sequence
actgtacgtt

SEQ ID NO: 629 - RNA, 10 nt, synthetic construct
  source 1..10: mol_type = other RNA
  misc_feature 1..10: note = Description of sequence: Splice site sequence
actgtactgc

SEQ ID NO: 630 - RNA, 10 nt, synthetic construct
  source 1..10: mol_type = other RNA
  misc_feature 1..10: note = Description of sequence: Splice site sequence
actgtaggct

SEQ ID NO: 631 - RNA, 10 nt, synthetic construct
  source 1..10: mol_type = other RNA
  misc_feature 1..10: note = Description of sequence: Splice site sequence
actgtaggta

SEQ ID NO: 632 - RNA, 10 nt, synthetic construct
  source 1..10: mol_type = other RNA
  misc_feature 1..10: note = Description of sequence: Splice site sequence
actgtatatt

SEQ ID NO: 633 - RNA, 10 nt, synthetic construct
  source 1..10: mol_type = other RNA
  misc_feature 1..10: note = Description of sequence: Splice site sequence
actgtatgaa

SEQ ID NO: 634 - RNA, 10 nt, synthetic construct
  source 1..10: mol_type = other RNA
  misc_feature 1..10: note = Description of sequence: Splice site sequence
actgtatgct

SEQ ID NO: 635 - RNA, 10 nt, synthetic construct
  source 1..10: mol_type = other RNA
  misc_feature 1..10: note = Description of sequence: Splice site sequence
actgtatgtg

SEQ ID NO: 636 - RNA, 10 nt, synthetic construct
  source 1..10: mol_type = other RNA
  misc_feature 1..10: note = Description of sequence: Splice site sequence
actgtattcc

SEQ ID NO: 637 - RNA, 10 nt, synthetic construct
  source 1..10: mol_type = other RNA
  misc_feature 1..10: note = Description of sequence: Splice site sequence
actgtcagct

SEQ ID NO: 638 - RNA, 10 nt, synthetic construct
  source 1..10: mol_type = other RNA
  misc_feature 1..10: note = Description of sequence: Splice site sequence
actgtcagtg

SEQ ID NO: 639 - RNA, 10 nt, synthetic construct
  source 1..10: mol_type = other RNA
  misc_feature 1..10: note = Description of sequence: Splice site sequence
actgtgaacg

SEQ ID NO: 640 - RNA, 10 nt, synthetic construct
  source 1..10: mol_type = other RNA
  misc_feature 1..10: note = Description of sequence: Splice site sequence
actgtgagca

SEQ ID NO: 641 - RNA, 10 nt, synthetic construct
  source 1..10: mol_type = other RNA
  misc_feature 1..10: note = Description of sequence: Splice site sequence
actgtgagcg

SEQ ID NO: 642 - RNA, 10 nt, synthetic construct
  source 1..10: mol_type = other RNA
  misc_feature 1..10: note = Description of sequence: Splice site sequence
actgtgagct

SEQ ID NO: 643 - RNA, 10 nt, synthetic construct
  source 1..10: mol_type = other RNA
  misc_feature 1..10: note = Description of sequence: Splice site sequence
actgtgagta

SEQ ID NO: 644 - RNA, 10 nt, synthetic construct
  source 1..10: mol_type = other RNA
  misc_feature 1..10: note = Description of sequence: Splice site sequence
actgtgagtc

SEQ ID NO: 645 - RNA, 10 nt, synthetic construct
  source 1..10: mol_type = other RNA
  misc_feature 1..10: note = Description of sequence: Splice site sequence
actgtgagtg

SEQ ID NO: 646 - RNA, 10 nt, synthetic construct
  source 1..10: mol_type = other RNA
  misc_feature 1..10: note = Description of sequence: Splice site sequence
actgtgagtt

SEQ ID NO: 647 - RNA, 10 nt, synthetic construct
  source 1..10: mol_type = other RNA
  misc_feature 1..10: note = Description of sequence: Splice site sequence
actgtgggta

SEQ ID NO: 648 - RNA, 10 nt, synthetic construct
  source 1..10: mol_type = other RNA
  misc_feature 1..10: note = Description of sequence: Splice site sequence
actgtgtgtg

SEQ ID NO: 649 - RNA, 10 nt, synthetic construct
  source 1..10: mol_type = other RNA
  misc_feature 1..10: note = Description of sequence: Splice site sequence
actgttaagt

SEQ ID NO: 650 - RNA, 10 nt, synthetic construct
  source 1..10: mol_type = other RNA
  misc_feature 1..10: note = Description of sequence: Splice site sequence
agagcaagta

SEQ ID NO: 651 - RNA, 10 nt, synthetic construct
  source 1..10: mol_type = other RNA
  misc_feature 1..10: note = Description of sequence: Splice site sequence
agagtaaaac

SEQ ID NO: 652 - RNA, 10 nt, synthetic construct
  source 1..10: mol_type = other RNA
  misc_feature 1..10: note = Description of sequence: Splice site sequence
agagtaaacg

SEQ ID NO: 653 - RNA, 10 nt, synthetic construct
  source 1..10: mol_type = other RNA
  misc_feature 1..10: note = Description of sequence: Splice site sequence
agagtaaaga

SEQ ID NO: 654 - RNA, 10 nt, synthetic construct
  source 1..10: mol_type = other RNA
  misc_feature 1..10: note = Description of sequence: Splice site sequence
agagtaaagt

SEQ ID NO: 655 - RNA, 10 nt, synthetic construct
  source 1..10: mol_type = other RNA
  misc_feature 1..10: note = Description of sequence: Splice site sequence
agagtaaatc

SEQ ID NO: 656 - RNA, 10 nt, synthetic construct
  source 1..10: mol_type = other RNA
  misc_feature 1..10: note = Description of sequence: Splice site sequence
agagtaaatg

SEQ ID NO: 657 - RNA, 10 nt, synthetic construct
  source 1..10: mol_type = other RNA
  misc_feature 1..10: note = Description of sequence: Splice site sequence
agagtaacat

SEQ ID NO: 658 - RNA, 10 nt, synthetic construct
  source 1..10: mol_type = other RNA
  misc_feature 1..10: note = Description of sequence: Splice site sequence
agagtaacta

SEQ ID NO: 659 - RNA, 10 nt, synthetic construct
  source 1..10: mol_type = other RNA
  misc_feature 1..10: note = Description of sequence: Splice site sequence
agagtaagaa

SEQ ID NO: 660 - RNA, 10 nt, synthetic construct
  source 1..10: mol_type = other RNA
  misc_feature 1..10: note = Description of sequence: Splice site sequence
agagtaagac

SEQ ID NO: 661 - RNA, 10 nt, synthetic construct
  source 1..10: mol_type = other RNA
  misc_feature 1..10: note = Description of sequence: Splice site sequence
agagtaagag

SEQ ID NO: 662 - RNA, 10 nt, synthetic construct
  source 1..10: mol_type = other RNA
  misc_feature 1..10: note = Description of sequence: Splice site sequence
agagtaagat

SEQ ID NO: 663 - RNA, 10 nt, synthetic construct
  source 1..10: mol_type = other RNA
  misc_feature 1..10: note = Description of sequence: Splice site sequence
agagtaagca

SEQ ID NO: 664 - RNA, 10 nt, synthetic construct
  source 1..10: mol_type = other RNA
  misc_feature 1..10: note = Description of sequence: Splice site sequence
agagtaagct

SEQ ID NO: 665 - RNA, 10 nt, synthetic construct
  source 1..10: mol_type = other RNA
  misc_feature 1..10: note = Description of sequence: Splice site sequence
agagtaagga

SEQ ID NO: 666 - RNA, 10 nt, synthetic construct
  source 1..10: mol_type = other RNA
  misc_feature 1..10: note = Description of sequence: Splice site sequence
agagtaaggc

SEQ ID NO: 667 - RNA, 10 nt, synthetic construct
  source 1..10: mol_type = other RNA
  misc_feature 1..10: note = Description of sequence: Splice site sequence
agagtaaggg

SEQ ID NO: 668 - RNA, 10 nt, synthetic construct
  source 1..10: mol_type = other RNA
  misc_feature 1..10: note = Description of sequence: Splice site sequence
agagtaaggt

SEQ ID NO: 669 - RNA, 10 nt, synthetic construct
  source 1..10: mol_type = other RNA
  misc_feature 1..10: note = Description of sequence: Splice site sequence
agagtaagtc

SEQ ID NO: 670 - RNA, 10 nt, synthetic construct
  source 1..10: mol_type = other RNA
  misc_feature 1..10: note = Description of sequence: Splice site sequence
agagtaagtg

SEQ ID NO: 671 - RNA, 10 nt, synthetic construct
  source 1..10: mol_type = other RNA
  misc_feature 1..10: note = Description of sequence: Splice site sequence
agagtaagtt

SEQ ID NO: 672 - RNA, 10 nt, synthetic construct
  source 1..10: mol_type = other RNA
  misc_feature 1..10: note = Description of sequence: Splice site sequence
agagtaataa

SEQ ID NO: 673 - RNA, 10 nt, synthetic construct
  source 1..10: mol_type = other RNA
  misc_feature 1..10: note = Description of sequence: Splice site sequence
agagtaatgt

SEQ ID NO: 674 - RNA, 10 nt, synthetic construct
  source 1..10: mol_type = other RNA
  misc_feature 1..10: note = Description of sequence: Splice site sequence
agagtaattc

SEQ ID NO: 675 - RNA, 10 nt, synthetic construct
  source 1..10: mol_type = other RNA
  misc_feature 1..10: note = Description of sequence: Splice site sequence
agagtaattt

SEQ ID NO: 676 - RNA, 10 nt, synthetic construct
  source 1..10: mol_type = other RNA
  misc_feature 1..10: note = Description of sequence: Splice site sequence
agagtacacc

SEQ ID NO: 677 - RNA, 10 nt, synthetic construct
  source 1..10: mol_type = other RNA
  misc_feature 1..10: note = Description of sequence: Splice site sequence
agagtacctg

SEQ ID NO: 678 - RNA, 10 nt, synthetic construct
  source 1..10: mol_type = other RNA
  misc_feature 1..10: note = Description of sequence: Splice site sequence
agagtacgtg

SEQ ID NO: 679 - RNA, 10 nt, synthetic construct
  source 1..10: mol_type = other RNA
  misc_feature 1..10: note = Description of sequence: Splice site sequence
agagtactct

SEQ ID NO: 680 - RNA, 10 nt, synthetic construct
  source 1..10: mol_type = other RNA
  misc_feature 1..10: note = Description of sequence: Splice site sequence
agagtactga

SEQ ID NO: 681 - RNA, 10 nt, synthetic construct
  source 1..10: mol_type = other RNA
  misc_feature 1..10: note = Description of sequence: Splice site sequence
agagtacttt

SEQ ID NO: 682 - RNA, 10 nt, synthetic construct
  source 1..10: mol_type = other RNA
  misc_feature 1..10: note = Description of sequence: Splice site sequence
agagtagctg

SEQ ID NO: 683 - RNA, 10 nt, synthetic construct
  source 1..10: mol_type = other RNA
  misc_feature 1..10: note = Description of sequence: Splice site sequence
agagtaggaa

SEQ ID NO: 684 - RNA, 10 nt, synthetic construct
  source 1..10: mol_type = other RNA
  misc_feature 1..10: note = Description of sequence: Splice site sequence
agagtaggga

SEQ ID NO: 685 - RNA, 10 nt, synthetic construct
  source 1..10: mol_type = other RNA
  misc_feature 1..10: note = Description of sequence: Splice site sequence
agagtagggt

SEQ ID NO: 686 - RNA, 10 nt, synthetic construct
  source 1..10: mol_type = other RNA
  misc_feature 1..10: note = Description of sequence: Splice site sequence
agagtaggtc

SEQ ID NO: 687 - RNA, 10 nt, synthetic construct
  source 1..10: mol_type = other RNA
  misc_feature 1..10: note = Description of sequence: Splice site sequence
agagtaggtg

SEQ ID NO: 688 - RNA, 10 nt, synthetic construct
  source 1..10: mol_type = other RNA
  misc_feature 1..10: note = Description of sequence: Splice site sequence
agagtaggtt

SEQ ID NO: 689 - RNA, 10 nt, synthetic construct
  source 1..10: mol_type = other RNA
  misc_feature 1..10: note = Description of sequence: Splice site sequence
agagtatata

SEQ ID NO: 690 - RNA, 10 nt, synthetic construct
  source 1..10: mol_type = other RNA
  misc_feature 1..10: note = Description of sequence: Splice site sequence
agagtatatt

SEQ ID NO: 691 - RNA, 10 nt, synthetic construct
  source 1..10: mol_type = other RNA
  misc_feature 1..10: note = Description of sequence: Splice site sequence
agagtatgaa

SEQ ID NO: 692 - RNA, 10 nt, synthetic construct
  source 1..10: mol_type = other RNA
  misc_feature 1..10: note = Description of sequence: Splice site sequence
agagtatgac

SEQ ID NO: 693 - RNA, 10 nt, synthetic construct
  source 1..10: mol_type = other RNA
  misc_feature 1..10: note = Description of sequence: Splice site sequence
agagtatgat

SEQ ID NO: 694 - RNA, 10 nt, synthetic construct
  source 1..10: mol_type = other RNA
  misc_feature 1..10: note = Description of sequence: Splice site sequence
agagtatgtc

SEQ ID NO: 695 - RNA, 10 nt, synthetic construct
  source 1..10: mol_type = other RNA
  misc_feature 1..10: note = Description of sequence: Splice site sequence
agagtatgtg

SEQ ID NO: 696 - RNA, 10 nt, synthetic construct
  source 1..10: mol_type = other RNA
  misc_feature 1..10: note = Description of sequence: Splice site sequence
agagtatgtt

SEQ ID NO: 697 - RNA, 10 nt, synthetic construct
  source 1..10: mol_type = other RNA
  misc_feature 1..10: note = Description of sequence: Splice site sequence
agagtattaa

SEQ ID NO: 698 - RNA, 10 nt, synthetic construct
  source 1..10: mol_type = other RNA
  misc_feature 1..10: note = Description of sequence: Splice site sequence
agagtattat

SEQ ID NO: 699 - RNA, 10 nt, synthetic construct
  source 1..10: mol_type = other RNA
  misc_feature 1..10: note = Description of sequence: Splice site sequence
agagtcagtg

SEQ ID NO: 700 - RNA, 10 nt, synthetic construct
  source 1..10: mol_type = other RNA
  misc_feature 1..10: note = Description of sequence: Splice site sequence
agagtgagac

SEQ ID NO: 701 - RNA, 10 nt, synthetic construct
  source 1..10: mol_type = other RNA
  misc_feature 1..10: note = Description of sequence: Splice site sequence
agagtgagag

SEQ ID NO: 702 - RNA, 10 nt, synthetic construct
  source 1..10: mol_type = other RNA
  misc_feature 1..10: note = Description of sequence: Splice site sequence
agagtgagat

SEQ ID NO: 703 - RNA, 10 nt, synthetic construct
  source 1..10: mol_type = other RNA
  misc_feature 1..10: note = Description of sequence: Splice site sequence
agagtgagca

SEQ ID NO: 704 - RNA, 10 nt, synthetic construct
  source 1..10: mol_type = other RNA
  misc_feature 1..10: note = Description of sequence: Splice site sequence
agagtgagta

SEQ ID NO: 705 - RNA, 10 nt, synthetic construct
  source 1..10: mol_type = other RNA
  misc_feature 1..10: note = Description of sequence: Splice site sequence
agagtgagtc

SEQ ID NO: 706 - RNA, 10 nt, synthetic construct
  source 1..10: mol_type = other RNA
  misc_feature 1..10: note = Description of sequence: Splice site sequence
agagtgagtg

SEQ ID NO: 707 - RNA, 10 nt, synthetic construct
  source 1..10: mol_type = other RNA
  misc_feature 1..10: note = Description of sequence: Splice site sequence
agagtgagtt

SEQ ID NO: 708 - RNA, 10 nt, synthetic construct
  source 1..10: mol_type = other RNA
  misc_feature 1..10: note = Description of sequence: Splice site sequence
agagtgcgtc

SEQ ID NO: 709 - RNA, 10 nt, synthetic construct
  source 1..10: mol_type = other RNA
  misc_feature 1..10: note = Description of sequence: Splice site sequence
agagtgggga

SEQ ID NO: 710 - RNA, 10 nt, synthetic construct
  source 1..10: mol_type = other RNA
  misc_feature 1..10: note = Description of sequence: Splice site sequence
agagtgggtg

SEQ ID NO: 711 - RNA, 10 nt, synthetic construct
  source 1..10: mol_type = other RNA
  misc_feature 1..10: note = Description of sequence: Splice site sequence
agagtgtgtg

SEQ ID NO: 712 - RNA, 10 nt, synthetic construct
  source 1..10: mol_type = other RNA
  misc_feature 1..10: note = Description of sequence: Splice site sequence
agagtgtttc

SEQ ID NO: 713 - RNA, 10 nt, synthetic construct
  source 1..10: mol_type = other RNA
  misc_feature 1..10: note = Description of sequence: Splice site sequence
agagttagta

SEQ ID NO: 714 - RNA, 10 nt, synthetic construct
  source 1..10: mol_type = other RNA
  misc_feature 1..10: note = Description of sequence: Splice site sequence
agagttgaga

SEQ ID NO: 715 - RNA, 10 nt, synthetic construct
  source 1..10: mol_type = other RNA
  misc_feature 1..10: note = Description of sequence: Splice site sequence
agagttgagt

SEQ ID NO: 716 - RNA, 10 nt, synthetic construct
  source 1..10: mol_type = other RNA
  misc_feature 1..10: note = Description of sequence: Splice site sequence
agagttggtt

SEQ ID NO: 717 - RNA, 10 nt, synthetic construct
  source 1..10: mol_type = other RNA
  misc_feature 1..10: note = Description of sequence: Splice site sequence
agagtttgat

SEQ ID NO: 718 - RNA, 10 nt, synthetic construct
  source 1..10: mol_type = other RNA
  misc_feature 1..10: note = Description of sequence: Splice site sequence
agcgtaagct

SEQ ID NO: 719 - RNA, 10 nt, synthetic construct
  source 1..10: mol_type = other RNA
  misc_feature 1..10: note = Description of sequence: Splice site sequence
agcgtaagtg

SEQ ID NO: 720 - RNA, 10 nt, synthetic construct
  source 1..10: mol_type = other RNA
  misc_feature 1..10: note = Description of sequence: Splice site sequence
agcgtgagcc

SEQ ID NO: 721 - RNA, 10 nt, synthetic construct
  source 1..10: mol_type = other RNA
  misc_feature 1..10: note = Description of sequence: Splice site sequence
agcgtgagtg

SEQ ID NO: 722 - RNA, 10 nt, synthetic construct
  source 1..10: mol_type = other RNA
  misc_feature 1..10: note = Description of sequence: Splice site sequence
agcgttgttc

SEQ ID NO: 723 - RNA, 10 nt, synthetic construct
  source 1..10: mol_type = other RNA
  misc_feature 1..10: note = Description of sequence: Splice site sequence
agggcagagt

SEQ ID NO: 724 - RNA, 10 nt, synthetic construct
  source 1..10: mol_type = other RNA
  misc_feature 1..10: note = Description of sequence: Splice site sequence
agggcagcct

SEQ ID NO: 725 - RNA, 10 nt, synthetic construct
  source 1..10: mol_type = other RNA
  misc_feature 1..10: note = Description of sequence: Splice site sequence
agggctagta

SEQ ID NO: 726 - RNA, 10 nt, synthetic construct
  source 1..10: mol_type = other RNA
  misc_feature 1..10: note = Description of sequence: Splice site sequence
agggtaaaga

SEQ ID NO: 727 - RNA, 10 nt, synthetic construct
  source 1..10: mol_type = other RNA
  misc_feature 1..10: note = Description of sequence: Splice site sequence
agggtaaata

SEQ ID NO: 728 - RNA, 10 nt, synthetic construct
  source 1..10: mol_type = other RNA
  misc_feature 1..10: note = Description of sequence: Splice site sequence
agggtaaatc

SEQ ID NO: 729 - RNA, 10 nt, synthetic construct
  source 1..10: mol_type = other RNA
  misc_feature 1..10: note = Description of sequence: Splice site sequence
agggtaaatt

SEQ ID NO: 730 - RNA, 10 nt, synthetic construct
  source 1..10: mol_type = other RNA
  misc_feature 1..10: note = Description of sequence: Splice site sequence
agggtaacca

SEQ ID NO: 731 - RNA, 10 nt, synthetic construct
  source 1..10: mol_type = other RNA
  misc_feature 1..10: note = Description of sequence: Splice site sequence
agggtaactg

SEQ ID NO: 732 - RNA, 10 nt, synthetic construct
  source 1..10: mol_type = other RNA
  misc_feature 1..10: note = Description of sequence: Splice site sequence
agggtaactt

SEQ ID NO: 733 - RNA, 10 nt, synthetic construct
  source 1..10: mol_type = other RNA
  misc_feature 1..10: note = Description of sequence: Splice site sequence
agggtaagaa

SEQ ID NO: 734 - RNA, 10 nt, synthetic construct
  source 1..10: mol_type = other RNA
  misc_feature 1..10: note = Description of sequence: Splice site sequence
agggtaagag

SEQ ID NO: 735 - RNA, 10 nt, synthetic construct
  source 1..10: mol_type = other RNA
  misc_feature 1..10: note = Description of sequence: Splice site sequence
agggtaagat

SEQ ID NO: 736 - RNA, 10 nt, synthetic construct
  source 1..10: mol_type = other RNA
  misc_feature 1..10: note = Description of sequence: Splice site sequence
agggtaagca

SEQ ID NO: 737 - RNA, 10 nt, synthetic construct
  source 1..10: mol_type = other RNA
  misc_feature 1..10: note = Description of sequence: Splice site sequence
agggtaagga

SEQ ID NO: 738 - RNA, 10 nt, synthetic construct
  source 1..10: mol_type = other RNA
  misc_feature 1..10: note = Description of sequence: Splice site sequence
agggtaaggc

SEQ ID NO: 739 - RNA, 10 nt, synthetic construct
  source 1..10: mol_type = other RNA
  misc_feature 1..10: note = Description of sequence: Splice site sequence
agggtaaggg

SEQ ID NO: 740 - RNA, 10 nt, synthetic construct
  source 1..10: mol_type = other RNA
  misc_feature 1..10: note = Description of sequence: Splice site sequence
agggtaagta

SEQ ID NO: 741 - RNA, 10 nt, synthetic construct
  source 1..10: mol_type = other RNA
  misc_feature 1..10: note = Description of sequence: Splice site sequence
agggtaagtc

SEQ ID NO: 742 - RNA, 10 nt, synthetic construct
  source 1..10: mol_type = other RNA
  misc_feature 1..10: note = Description of sequence: Splice site sequence
agggtaagtg

SEQ ID NO: 743 - RNA, 10 nt, synthetic construct
  source 1..10: mol_type = other RNA
  misc_feature 1..10: note = Description of sequence: Splice site sequence
agggtaagtt

SEQ ID NO: 744 - RNA, 10 nt, synthetic construct
  source 1..10: mol_type = other RNA
  misc_feature 1..10: note = Description of sequence: Splice site sequence
agggtaatac

SEQ ID NO: 745 - RNA, 10 nt, synthetic construct
  source 1..10: mol_type = other RNA
  misc_feature 1..10: note = Description of sequence: Splice site sequence
agggtaatga

SEQ ID NO: 746 - RNA, 10 nt, synthetic construct
  source 1..10: mol_type = other RNA
  misc_feature 1..10: note = Description of sequence: Splice site sequence
agggtaatta

SEQ ID NO: 747 - RNA, 10 nt, synthetic construct
  source 1..10: mol_type = other RNA
  misc_feature 1..10: note = Description of sequence: Splice site sequence
agggtaattt

SEQ ID NO: 748 - RNA, 10 nt, synthetic construct
  source 1..10: mol_type = other RNA
  misc_feature 1..10: note = Description of sequence: Splice site sequence
agggtacacc

SEQ ID NO: 749 - RNA, 10 nt, synthetic construct
  source 1..10: mol_type = other RNA
  misc_feature 1..10: note = Description of sequence: Splice site sequence
agggtacagt

SEQ ID NO: 750 - RNA, 10 nt, synthetic construct
  source 1..10: mol_type = other RNA
  misc_feature 1..10: note = Description of sequence: Splice site sequence
agggtacggt

SEQ ID NO: 751 - RNA, 10 nt, synthetic construct
  source 1..10: mol_type = other RNA
  misc_feature 1..10: note = Description of sequence: Splice site sequence
agggtaggac

SEQ ID NO: 752 - RNA, 10 nt, synthetic construct
  source 1..10: mol_type = other RNA
  misc_feature 1..10: note = Description of sequence: Splice site sequence
agggtaggag

SEQ ID NO: 753 - RNA, 10 nt, synthetic construct
  source 1..10: mol_type = other RNA
  misc_feature 1..10: note = Description of sequence: Splice site sequence
agggtaggca

SEQ ID NO: 754 - RNA, 10 nt, synthetic construct
  source 1..10: mol_type = other RNA
  misc_feature 1..10: note = Description of sequence: Splice site sequence
agggtaggcc

SEQ ID NO: 755 - RNA, 10 nt, synthetic construct
  source 1..10: mol_type = other RNA
  misc_feature 1..10: note = Description of sequence: Splice site sequence
agggtaggga

SEQ ID NO: 756 - RNA, 10 nt, synthetic construct
  source 1..10: mol_type = other RNA
  misc_feature 1..10: note = Description of sequence: Splice site sequence
agggtagggt

SEQ ID NO: 757 - RNA, 10 nt, synthetic construct
  source 1..10: mol_type = other RNA
  misc_feature 1..10: note = Description of sequence: Splice site sequence
agggtaggtc

SEQ ID NO: 758 - RNA, 10 nt, synthetic construct
  source 1..10: mol_type = other RNA
  misc_feature 1..10: note = Description of sequence: Splice site sequence
agggtaggtg

SEQ ID NO: 759 - RNA, 10 nt, synthetic construct
  source 1..10: mol_type = other RNA
  misc_feature 1..10: note = Description of sequence: Splice site sequence
agggtaggtt

SEQ ID NO: 760 - RNA, 10 nt, synthetic construct
  source 1..10: mol_type = other RNA
  misc_feature 1..10: note = Description of sequence: Splice site sequence
agggtatata

SEQ ID NO: 761 - RNA, 10 nt, synthetic construct
  source 1..10: mol_type = other RNA
  misc_feature 1..10: note = Description of sequence: Splice site sequence
agggtatgac

SEQ ID NO: 762 - RNA, 10 nt, synthetic construct
  source 1..10: mol_type = other RNA
  misc_feature 1..10: note = Description of sequence: Splice site sequence
agggtatgag

SEQ ID NO: 763 - RNA, 10 nt, synthetic construct
  source 1..10: mol_type = other RNA
  misc_feature 1..10: note = Description of sequence: Splice site sequence
agggtatgat

SEQ ID NO: 764 - RNA, 10 nt, synthetic construct
  source 1..10: mol_type = other RNA
  misc_feature 1..10: note = Description of sequence: Splice site sequence
agggtatgca

SEQ ID NO: 765 - RNA, 10 nt, synthetic construct
  source 1..10: mol_type = other RNA
  misc_feature 1..10: note = Description of sequence: Splice site sequence
agggtatgct

SEQ ID NO: 766 - RNA, 10 nt, synthetic construct
  source 1..10: mol_type = other RNA
  misc_feature 1..10: note = Description of sequence: Splice site sequence
agggtatggg

SEQ ID NO: 767 - RNA, 10 nt, synthetic construct
  source 1..10: mol_type = other RNA
  misc_feature 1..10: note = Description of sequence: Splice site sequence
agggtatggt

SEQ ID NO: 768 - RNA, 10 nt, synthetic construct
  source 1..10: mol_type = other RNA
  misc_feature 1..10: note = Description of sequence: Splice site sequence
agggtatgta

SEQ ID NO: 769 - RNA, 10 nt, synthetic construct
  source 1..10: mol_type = other RNA
  misc_feature 1..10: note = Description of sequence: Splice site sequence
agggtatgtc

SEQ ID NO: 770 - RNA, 10 nt, synthetic construct
  source 1..10: mol_type = other RNA
  misc_feature 1..10: note = Description of sequence: Splice site sequence
agggtatgtg

SEQ ID NO: 771 - RNA, 10 nt, synthetic construct
  source 1..10: mol_type = other RNA
  misc_feature 1..10: note = Description of sequence: Splice site sequence
agggtattac

SEQ ID NO: 772 - RNA, 10 nt, synthetic construct
  source 1..10: mol_type = other RNA
  misc_feature 1..10: note = Description of sequence: Splice site sequence
agggtattct

SEQ ID NO: 773 - RNA, 10 nt, synthetic construct
  source 1..10: mol_type = other RNA
  misc_feature 1..10: note = Description of sequence: Splice site sequence
agggtatttc

SEQ ID NO: 774 - RNA, 10 nt, synthetic construct
  source 1..10: mol_type = other RNA
  misc_feature 1..10: note = Description of sequence: Splice site sequence
agggtcagag

SEQ ID NO: 775 - RNA, 10 nt, synthetic construct
  source 1..10: mol_type = other RNA
  misc_feature 1..10: note = Description of sequence: Splice site sequence
agggtcagca

SEQ ID NO: 776 - RNA, 10 nt, synthetic construct
  source 1..10: mol_type = other RNA
  misc_feature 1..10: note = Description of sequence: Splice site sequence
agggtcagga

SEQ ID NO: 777 - RNA, 10 nt, synthetic construct
  source 1..10: mol_type = other RNA
  misc_feature 1..10: note = Description of sequence: Splice site sequence
agggtcaggg

SEQ ID NO: 778 - RNA, 10 nt, synthetic construct
  source 1..10: mol_type = other RNA
  misc_feature 1..10: note = Description of sequence: Splice site sequence
agggtcagtg

SEQ ID NO: 779 - RNA, 10 nt, synthetic construct
  source 1..10: mol_type = other RNA
  misc_feature 1..10: note = Description of sequence: Splice site sequence
agggtcagtt

SEQ ID NO: 780 - RNA, 10 nt, synthetic construct
  source 1..10: mol_type = other RNA
  misc_feature 1..10: note = Description of sequence: Splice site sequence
agggtcccct

SEQ ID NO: 781 - RNA, 10 nt, synthetic construct
  source 1..10: mol_type = other RNA
  misc_feature 1..10: note = Description of sequence: Splice site sequence
agggtcggga

SEQ ID NO: 782 - RNA, 10 nt, synthetic construct
  source 1..10: mol_type = other RNA
  misc_feature 1..10: note = Description of sequence: Splice site sequence
agggtctgca

SEQ ID NO: 783 - RNA, 10 nt, synthetic construct
  source 1..10: mol_type = other RNA
  misc_feature 1..10: note = Description of sequence: Splice site sequence
agggtctgtt

SEQ ID NO: 784 - RNA, 10 nt, synthetic construct
  source 1..10: mol_type = other RNA
  misc_feature 1..10: note = Description of sequence: Splice site sequence
agggtgaaga

SEQ ID NO: 785 - RNA, 10 nt, synthetic construct
  source 1..10: mol_type = other RNA
  misc_feature 1..10: note = Description of sequence: Splice site sequence
agggtgacta

SEQ ID NO: 786 - RNA, 10 nt, synthetic construct
  source 1..10: mol_type = other RNA
  misc_feature 1..10: note = Description of sequence: Splice site sequence
agggtgagaa

SEQ ID NO: 787 - RNA, 10 nt, synthetic construct
  source 1..10: mol_type = other RNA
  misc_feature 1..10: note = Description of sequence: Splice site sequence
agggtgagac

SEQ ID NO: 788 - RNA, 10 nt, synthetic construct
  source 1..10: mol_type = other RNA
  misc_feature 1..10: note = Description of sequence: Splice site sequence
agggtgagag

SEQ ID NO: 789 - RNA, 10 nt, synthetic construct
  source 1..10: mol_type = other RNA
  misc_feature 1..10: note = Description of sequence: Splice site sequence
agggtgagca

SEQ ID NO: 790 - RNA, 10 nt, synthetic construct
  source 1..10: mol_type = other RNA
  misc_feature 1..10: note = Description of sequence: Splice site sequence
agggtgagcc

SEQ ID NO: 791 - RNA, 10 nt, synthetic construct
  source 1..10: mol_type = other RNA
  misc_feature 1..10: note = Description of sequence: Splice site sequence
agggtgagct

SEQ ID NO: 792 - RNA, 10 nt, synthetic construct
  source 1..10: mol_type = other RNA
  misc_feature 1..10: note = Description of sequence: Splice site sequence
agggtgagga

SEQ ID NO: 793 - RNA, 10 nt, synthetic construct
  source 1..10: mol_type = other RNA
  misc_feature 1..10: note = Description of sequence: Splice site sequence
agggtgaggg

SEQ ID NO: 794 - RNA, 10 nt, synthetic construct
  source 1..10: mol_type = other RNA
  misc_feature 1..10: note = Description of sequence: Splice site sequence
agggtgaggt

SEQ ID NO: 795 - RNA, 10 nt, synthetic construct
  source 1..10: mol_type = other RNA
  misc_feature 1..10: note = Description of sequence: Splice site sequence
agggtgagta

SEQ ID NO: 796 - RNA, 10 nt, synthetic construct
  source 1..10: mol_type = other RNA
  misc_feature 1..10: note = Description of sequence: Splice site sequence
agggtgagtc

SEQ ID NO: 797 - RNA, 10 nt, synthetic construct
  source 1..10: mol_type = other RNA
  misc_feature 1..10: note = Description of sequence: Splice site sequence
agggtgagtg

SEQ ID NO: 798 - RNA, 10 nt, synthetic construct
  source 1..10: mol_type = other RNA
  misc_feature 1..10: note = Description of sequence: Splice site sequence
agggtgagtt

SEQ ID NO: 799 - RNA, 10 nt, synthetic construct
  source 1..10: mol_type = other RNA
  misc_feature 1..10: note = Description of sequence: Splice site sequence
agggtgggga

SEQ ID NO: 800 - RNA, 10 nt, synthetic construct
  source 1..10: mol_type = other RNA
  misc_feature 1..10: note = Description of sequence: Splice site sequence
agggtggggt

SEQ ID NO: 801 - RNA, 10 nt, synthetic construct
  source 1..10: mol_type = other RNA
  misc_feature 1..10: note = Description of sequence: Splice site sequence
agggtgggta

SEQ ID NO: 802 - RNA, 10 nt, synthetic construct
  source 1..10: mol_type = other RNA
  misc_feature 1..10: note = Description of sequence: Splice site sequence
agggtgggtg

SEQ ID NO: 803 - RNA, 10 nt, synthetic construct
  source 1..10: mol_type = other RNA
  misc_feature 1..10: note = Description of sequence: Splice site sequence
agggtgtgta

SEQ ID NO: 804 - RNA, 10 nt, synthetic construct
  source 1..10: mol_type = other RNA
  misc_feature 1..10: note = Description of sequence: Splice site sequence
agggtgtgtg

SEQ ID NO: 805 - RNA, 10 nt, synthetic construct
  source 1..10: mol_type = other RNA
  misc_feature 1..10: note = Description of sequence: Splice site sequence
agggttaatg

SEQ ID NO: 806 - RNA, 10 nt, synthetic construct
  source 1..10: mol_type = other RNA
  misc_feature 1..10: note = Description of sequence: Splice site sequence
agggttagaa

SEQ ID NO: 807 - RNA, 10 nt, synthetic construct
  source 1..10: mol_type = other RNA
  misc_feature 1..10: note = Description of sequence: Splice site sequence
agggttagtt

SEQ ID NO: 808 - RNA, 10 nt, synthetic construct
  source 1..10: mol_type = other RNA
  misc_feature 1..10: note = Description of sequence: Splice site sequence
agggttggtg

SEQ ID NO: 809 - RNA, 10 nt, synthetic construct
  source 1..10: mol_type = other RNA
  misc_feature 1..10: note = Description of sequence: Splice site sequence
agggtttgtg

SEQ ID NO: 810 - RNA, 10 nt, synthetic construct
  source 1..10: mol_type = other RNA
  misc_feature 1..10: note = Description of sequence: Splice site sequence
agggtttgtt

SEQ ID NO: 811 - RNA, 10 nt, synthetic construct
  source 1..10: mol_type = other RNA
  misc_feature 1..10: note = Description of sequence: Splice site sequence
agtgtaaaag

SEQ ID NO: 812 - RNA, 10 nt, synthetic construct
  source 1..10: mol_type = other RNA
  misc_feature 1..10: note = Description of sequence: Splice site sequence
agtgtaaata

SEQ ID NO: 813 - RNA, 10 nt, synthetic construct
  source 1..10: mol_type = other RNA
  misc_feature 1..10: note = Description of sequence: Splice site sequence
agtgtaaatt

SEQ ID NO: 814 - RNA, 10 nt, synthetic construct
  source 1..10: mol_type = other RNA
  misc_feature 1..10: note = Description of sequence: Splice site sequence
agtgtaagaa

SEQ ID NO: 815 - RNA, 10 nt, synthetic construct
  source 1..10: mol_type = other RNA
  misc_feature 1..10: note = Description of sequence: Splice site sequence
agtgtaagag

SEQ ID NO: 816 - RNA, 10 nt, synthetic construct
  source 1..10: mol_type = other RNA
  misc_feature 1..10: note = Description of sequence: Splice site sequence
agtgtaagat

SEQ ID NO: 817 - RNA, 10 nt, synthetic construct
  source 1..10: mol_type = other RNA
  misc_feature 1..10: note = Description of sequence: Splice site sequence
agtgtaagca

SEQ ID NO: 818 - RNA, 10 nt, synthetic construct
  source 1..10: mol_type = other RNA
  misc_feature 1..10: note = Description of sequence: Splice site sequence
agtgtaagcc

SEQ ID NO: 819 - RNA, 10 nt, synthetic construct
  source 1..10: mol_type = other RNA
  misc_feature 1..10: note = Description of sequence: Splice site sequence
agtgtaagta

SEQ ID NO: 820 - RNA, 10 nt, synthetic construct
  source 1..10: mol_type = other RNA
  misc_feature 1..10: note = Description of sequence: Splice site sequence
agtgtaagtg

SEQ ID NO: 821 - RNA, 10 nt, synthetic construct
  source 1..10: mol_type = other RNA
  misc_feature 1..10: note = Description of sequence: Splice site sequence
agtgtaagtt

SEQ ID NO: 822 - RNA, 10 nt, synthetic construct
  source 1..10: mol_type = other RNA
  misc_feature 1..10: note = Description of sequence: Splice site sequence
agtgtaattg

SEQ ID NO: 823 - RNA, 10 nt, synthetic construct
  source 1..10: mol_type = other RNA
  misc_feature 1..10: note = Description of sequence: Splice site sequence
agtgtaggac

SEQ ID NO: 824 - RNA, 10 nt, synthetic construct
  source 1..10: mol_type = other RNA
  misc_feature 1..10: note = Description of sequence: Splice site sequence
agtgtaggtc

SEQ ID NO: 825 - RNA, 10 nt, synthetic construct
  source 1..10: mol_type = other RNA
  misc_feature 1..10: note = Description of sequence: Splice site sequence
agtgtatgag

SEQ ID NO: 826 - RNA, 10 nt, synthetic construct
  source 1..10: mol_type = other RNA
  misc_feature 1..10: note = Description of sequence: Splice site sequence
agtgtatgta

SEQ ID NO: 827 - RNA, 10 nt, synthetic construct
  source 1..10: mol_type = other RNA
  misc_feature 1..10: note = Description of sequence: Splice site sequence
agtgtatgtt

SEQ ID NO: 828 - RNA, 10 nt, synthetic construct
  source 1..10: mol_type = other RNA
  misc_feature 1..10: note = Description of sequence: Splice site sequence
agtgtattgt

SEQ ID NO: 829 - RNA, 10 nt, synthetic construct
  source 1..10: mol_type = other RNA
  misc_feature 1..10: note = Description of sequence: Splice site sequence
agtgtattta

SEQ ID NO: 830 - RNA, 10 nt, synthetic construct
  source 1..10: mol_type = other RNA
  misc_feature 1..10: note = Description of sequence: Splice site sequence
agtgtcagtc

SEQ ID NO: 831 - RNA, 10 nt, synthetic construct
  source 1..10: mol_type = other RNA
  misc_feature 1..10: note = Description of sequence: Splice site sequence
agtgtgagag

SEQ ID NO: 832 - RNA, 10 nt, synthetic construct
  source 1..10: mol_type = other RNA
  misc_feature 1..10: note = Description of sequence: Splice site sequence
agtgtgagca

SEQ ID NO: 833 - RNA, 10 nt, synthetic construct
  source 1..10: mol_type = other RNA
  misc_feature 1..10: note = Description of sequence: Splice site sequence
agtgtgagcc

SEQ ID NO: 834 - RNA, 10 nt, synthetic construct
  source 1..10: mol_type = other RNA
  misc_feature 1..10: note = Description of sequence: Splice site sequence
agtgtgagct

SEQ ID NO: 835 - RNA, 10 nt, synthetic construct
  source 1..10: mol_type = other RNA
  misc_feature 1..10: note = Description of sequence: Splice site sequence
agtgtgagta

SEQ ID NO: 836 - RNA, 10 nt, synthetic construct
  source 1..10: mol_type = other RNA
  misc_feature 1..10: note = Description of sequence: Splice site sequence
agtgtgagtc

SEQ ID NO: 837 - RNA, 10 nt, synthetic construct
  source 1..10: mol_type = other RNA
  misc_feature 1..10: note = Description of sequence: Splice site sequence
agtgtgagtg

SEQ ID NO: 838 - RNA, 10 nt, synthetic construct
  source 1..10: mol_type = other RNA
  misc_feature 1..10: note = Description of sequence: Splice site sequence
agtgtgagtt

SEQ ID NO: 839 - RNA, 10 nt, synthetic construct
  source 1..10: mol_type = other RNA
  misc_feature 1..10: note = Description of sequence: Splice site sequence
agtgtgggta

SEQ ID NO: 840 - RNA, 10 nt, synthetic construct
  source 1..10: mol_type = other RNA
  misc_feature 1..10: note = Description of sequence: Splice site sequence
agtgtgggtg

SEQ ID NO: 841 - RNA, 10 nt, synthetic construct
  source 1..10: mol_type = other RNA
  misc_feature 1..10: note = Description of sequence: Splice site sequence
agtgtgtgta

SEQ ID NO: 842 - RNA, 10 nt, synthetic construct
  source 1..10: mol_type = other RNA
  misc_feature 1..10: note = Description of sequence: Splice site sequence
agtgttccta

SEQ ID NO: 843 - RNA, 10 nt, synthetic construct
  source 1..10: mol_type = other RNA
  misc_feature 1..10: note = Description of sequence: Splice site sequence
agtgttgggg

SEQ ID NO: 844 - RNA, 10 nt, synthetic construct
  source 1..10: mol_type = other RNA
  misc_feature 1..10: note = Description of sequence: Splice site sequence
agtgtttcag

SEQ ID NO: 845 - RNA, 10 nt, synthetic construct
  source 1..10: mol_type = other RNA
  misc_feature 1..10: note = Description of sequence: Splice site sequence
atagtaaata

SEQ ID NO: 846 - RNA, 10 nt, synthetic construct
  source 1..10: mol_type = other RNA
  misc_feature 1..10: note = Description of sequence: Splice site sequence
atagtaagac

SEQ ID NO: 847 - RNA, 10 nt, synthetic construct
  source 1..10: mol_type = other RNA
  misc_feature 1..10: note = Description of sequence: Splice site sequence
atagtaagat

SEQ ID NO: 848 - RNA, 10 nt, synthetic construct
  source 1..10: mol_type = other RNA
  misc_feature 1..10: note = Description of sequence: Splice site sequence
atagtaagca

SEQ ID NO: 849 - RNA, 10 nt, synthetic construct
  source 1..10: mol_type = other RNA
  misc_feature 1..10: note = Description of sequence: Splice site sequence
atagtaagta

SEQ ID NO: 850 - RNA, 10 nt, synthetic construct
  source 1..10: mol_type = other RNA
  misc_feature 1..10: note = Description of sequence: Splice site sequence
atagtaagtg

SEQ ID NO: 851 - RNA, 10 nt, synthetic construct
  source 1..10: mol_type = other RNA
  misc_feature 1..10: note = Description of sequence: Splice site sequence
atagtaagtt

SEQ ID NO: 852 - RNA, 10 nt, synthetic construct
  source 1..10: mol_type = other RNA
  misc_feature 1..10: note = Description of sequence: Splice site sequence
atagtaggta

SEQ ID NO: 853 - RNA, 10 nt, synthetic construct
  source 1..10: mol_type = other RNA
  misc_feature 1..10: note = Description of sequence: Splice site sequence
atagtatgtt

SEQ ID NO: 854 - RNA, 10 nt, synthetic construct
  source 1..10: mol_type = other RNA
  misc_feature 1..10: note = Description of sequence: Splice site sequence
atagtctcac

SEQ ID NO: 855 - RNA, 10 nt, synthetic construct
  source 1..10: mol_type = other RNA
  misc_feature 1..10: note = Description of sequence: Splice site sequence
atagtgagac

SEQ ID NO: 856 - RNA, 10 nt, synthetic construct
  source 1..10: mol_type = other RNA
  misc_feature 1..10: note = Description of sequence: Splice site sequence
atagtgagag

SEQ ID NO: 857 - RNA, 10 nt, synthetic construct
  source 1..10: mol_type = other RNA
  misc_feature 1..10: note = Description of sequence: Splice site sequence
atagtgagat

SEQ ID NO: 858 - RNA, 10 nt, synthetic construct
  source 1..10: mol_type = other RNA
  misc_feature 1..10: note = Description of sequence: Splice site sequence
atagtgagcc

SEQ ID NO: 859 - RNA, 10 nt, synthetic construct
  source 1..10: mol_type = other RNA
  misc_feature 1..10: note = Description of sequence: Splice site sequence
atagtgaggc

SEQ ID NO: 860 - RNA, 10 nt, synthetic construct
  source 1..10: mol_type = other RNA
  misc_feature 1..10: note = Description of sequence: Splice site sequence
atagtgagta

SEQ ID NO: 861 - RNA, 10 nt, synthetic construct
  source 1..10: mol_type = other RNA
  misc_feature 1..10: note = Description of sequence: Splice site sequence
atagtgagtc

SEQ ID NO: 862 - RNA, 10 nt, synthetic construct
  source 1..10: mol_type = other RNA
  misc_feature 1..10: note = Description of sequence: Splice site sequence
atagtgagtg

SEQ ID NO: 863 - RNA, 10 nt, synthetic construct
  source 1..10: mol_type = other RNA
  misc_feature 1..10: note = Description of sequence: Splice site sequence
atagtgcgtc

SEQ ID NO: 864 - RNA, 10 nt, synthetic construct
  source 1..10: mol_type = other RNA
  misc_feature 1..10: note = Description of sequence: Splice site sequence
atagtgtgta

SEQ ID NO: 865 - RNA, 10 nt, synthetic construct
  source 1..10: mol_type = other RNA
  misc_feature 1..10: note = Description of sequence: Splice site sequence
atagttcagt

SEQ ID NO: 866 - RNA, 10 nt, synthetic construct
  source 1..10: mol_type = other RNA
  misc_feature 1..10: note = Description of sequence: Splice site sequence
atcgtaagcc

SEQ ID NO: 867 - RNA, 10 nt, synthetic construct
  source 1..10: mol_type = other RNA
  misc_feature 1..10: note = Description of sequence: Splice site sequence
atcgtaagtt

SEQ ID NO: 868 - RNA, 10 nt, synthetic construct
  source 1..10: mol_type = other RNA
  misc_feature 1..10: note = Description of sequence: Splice site sequence
atcgtattcc

SEQ ID NO: 869 - RNA, 10 nt, synthetic construct
  source 1..10: mol_type = other RNA
  misc_feature 1..10: note = Description of sequence: Splice site sequence
atcgtgagta

SEQ ID NO: 870 - RNA, 10 nt, synthetic construct
  source 1..10: mol_type = other RNA
  misc_feature 1..10: note = Description of sequence: Splice site sequence
atggcaagcg

SEQ ID NO: 871 - RNA, 10 nt, synthetic construct
  source 1..10: mol_type = other RNA
  misc_feature 1..10: note = Description of sequence: Splice site sequence
atggcaagga

SEQ ID NO: 872 - RNA, 10 nt, synthetic construct
  source 1..10: mol_type = other RNA
  misc_feature 1..10: note = Description of sequence: Splice site sequence
atggcaagtt

SEQ ID NO: 873 - RNA, 10 nt, synthetic construct
  source 1..10: mol_type = other RNA
  misc_feature 1..10: note = Description of sequence: Splice site sequence
atggcaggta

SEQ ID NO: 874 - RNA, 10 nt, synthetic construct
  source 1..10: mol_type = other RNA
  misc_feature 1..10: note = Description of sequence: Splice site sequence
atggcatgtg

SEQ ID NO: 875 - RNA, 10 nt, synthetic construct
  source 1..10: mol_type = other RNA
  misc_feature 1..10: note = Description of sequence: Splice site sequence
atggcgccat

SEQ ID NO: 876 - RNA, 10 nt, synthetic construct
  source 1..10: mol_type = other RNA
  misc_feature 1..10: note = Description of sequence: Splice site sequence
atggcttgtg

SEQ ID NO: 877 - RNA, 10 nt, synthetic construct
  source 1..10: mol_type = other RNA
  misc_feature 1..10: note = Description of sequence: Splice site sequence
atggtaaaac

SEQ ID NO: 878 - RNA, 10 nt, synthetic construct
  source 1..10: mol_type = other RNA
  misc_feature 1..10: note = Description of sequence: Splice site sequence
atggtaaaat

SEQ ID NO: 879 - RNA, 10 nt, synthetic construct
  source 1..10: mol_type = other RNA
  misc_feature 1..10: note = Description of sequence: Splice site sequence
atggtaaacc

SEQ ID NO: 880 - RNA, 10 nt, synthetic construct
  source 1..10: mol_type = other RNA
  misc_feature 1..10: note = Description of sequence: Splice site sequence
atggtaaaga

SEQ ID NO: 881 - RNA, 10 nt, synthetic construct
  source 1..10: mol_type = other RNA
  misc_feature 1..10: note = Description of sequence: Splice site sequence
atggtaaata

SEQ ID NO: 882 - RNA, 10 nt, synthetic construct
  source 1..10: mol_type = other RNA
  misc_feature 1..10: note = Description of sequence: Splice site sequence
atggtaaatg

SEQ ID NO: 883 - RNA, 10 nt, synthetic construct
  source 1..10: mol_type = other RNA
  misc_feature 1..10: note = Description of sequence: Splice site sequence
atggtaaatt

SEQ ID NO: 884 - RNA, 10 nt, synthetic construct
  source 1..10: mol_type = other RNA
  misc_feature 1..10: note = Description of sequence: Splice site sequence
atggtaacag

SEQ ID NO: 885 - RNA, 10 nt, synthetic construct
  source 1..10: mol_type = other RNA
  misc_feature 1..10: note = Description of sequence: Splice site sequence
atggtaacat

SEQ ID NO: 886 - RNA, 10 nt, synthetic construct
  source 1..10: mol_type = other RNA
  misc_feature 1..10: note = Description of sequence: Splice site sequence
atggtaacta

SEQ ID NO: 887 - RNA, 10 nt, synthetic construct
  source 1..10: mol_type = other RNA
  misc_feature 1..10: note = Description of sequence: Splice site sequence
atggtaactc

SEQ ID NO: 888 - RNA, 10 nt, synthetic construct
  source 1..10: mol_type = other RNA
  misc_feature 1..10: note = Description of sequence: Splice site sequence
atggtaactt

SEQ ID NO: 889 - RNA, 10 nt, synthetic construct
  source 1..10: mol_type = other RNA
  misc_feature 1..10: note = Description of sequence: Splice site sequence
atggtaagaa

SEQ ID NO: 890 - RNA, 10 nt, synthetic construct
  source 1..10: mol_type = other RNA
  misc_feature 1..10: note = Description of sequence: Splice site sequence
atggtaagac

SEQ ID NO: 891 - RNA, 10 nt, synthetic construct
  source 1..10: mol_type = other RNA
  misc_feature 1..10: note = Description of sequence: Splice site sequence
atggtaagag

SEQ ID NO: 892 - RNA, 10 nt, synthetic construct
  source 1..10: mol_type = other RNA
  misc_feature 1..10: note = Description of sequence: Splice site sequence
atggtaagat

SEQ ID NO: 893 - RNA, 10 nt, synthetic construct
  source 1..10: mol_type = other RNA
  misc_feature 1..10: note = Description of sequence: Splice site sequence
atggtaagca

SEQ ID NO: 894 - RNA, 10 nt, synthetic construct
  source 1..10: mol_type = other RNA
  misc_feature 1..10: note = Description of sequence: Splice site sequence
atggtaagcc

SEQ ID NO: 895 - RNA, 10 nt, synthetic construct
  source 1..10: mol_type = other RNA
  misc_feature 1..10: note = Description of sequence: Splice site sequence
atggtaagct

SEQ ID NO: 896 - RNA, 10 nt, synthetic construct
  source 1..10: mol_type = other RNA
  misc_feature 1..10: note = Description of sequence: Splice site sequence
atggtaagga

SEQ ID NO: 897 - RNA, 10 nt, synthetic construct
  source 1..10: mol_type = other RNA
  misc_feature 1..10: note = Description of sequence: Splice site sequence
atggtaaggg

SEQ ID NO: 898 - RNA, 10 nt, synthetic construct
  source 1..10: mol_type = other RNA
  misc_feature 1..10: note = Description of sequence: Splice site sequence
atggtaagta

SEQ ID NO: 899 - RNA, 10 nt, synthetic construct
  source 1..10: mol_type = other RNA
  misc_feature 1..10: note = Description of sequence: Splice site sequence
atggtaagtc

SEQ ID NO: 900 - RNA, 10 nt, synthetic construct
  source 1..10: mol_type = other RNA
  misc_feature 1..10: note = Description of sequence: Splice site sequence
atggtaagtg

SEQ ID NO: 901 - RNA, 10 nt, synthetic construct
  source 1..10: mol_type = other RNA
  misc_feature 1..10: note = Description of sequence: Splice site sequence
atggtaagtt

SEQ ID NO: 902 - RNA, 10 nt, synthetic construct
  source 1..10: mol_type = other RNA
  misc_feature 1..10: note = Description of sequence: Splice site sequence
atggtaataa

SEQ ID NO: 903 - RNA, 10 nt, synthetic construct
  source 1..10: mol_type = other RNA
  misc_feature 1..10: note = Description of sequence: Splice site sequence
atggtaatat

SEQ ID NO: 904 - RNA, 10 nt, synthetic construct
  source 1..10: mol_type = other RNA
  misc_feature 1..10: note = Description of sequence: Splice site sequence
atggtaatga

SEQ ID NO: 905 - RNA, 10 nt, synthetic construct
  source 1..10: mol_type = other RNA
  misc_feature 1..10: note = Description of sequence: Splice site sequence
atggtaatgg

SEQ ID NO: 906 - RNA, 10 nt, synthetic construct
  source 1..10: mol_type = other RNA
  misc_feature 1..10: note = Description of sequence: Splice site sequence
atggtaattg

SEQ ID NO: 907 - RNA, 10 nt, synthetic construct
  source 1..10: mol_type = other RNA
  misc_feature 1..10: note = Description of sequence: Splice site sequence
atggtaattt

SEQ ID NO: 908 - RNA, 10 nt, synthetic construct
  source 1..10: mol_type = other RNA
  misc_feature 1..10: note = Description of sequence: Splice site sequence
atggtacagc

SEQ ID NO: 909 - RNA, 10 nt, synthetic construct
  source 1..10: mol_type = other RNA
  misc_feature 1..10: note = Description of sequence: Splice site sequence
atggtacatc

SEQ ID NO: 910 - RNA, 10 nt, synthetic construct
  source 1..10: mol_type = other RNA
  misc_feature 1..10: note = Description of sequence: Splice site sequence
atggtaccag

SEQ ID NO: 911 - RNA, 10 nt, synthetic construct
  source 1..10: mol_type = other RNA
  misc_feature 1..10: note = Description of sequence: Splice site sequence
atggtacctg

SEQ ID NO: 912 - RNA, 10 nt, synthetic construct
  source 1..10: mol_type = other RNA
  misc_feature 1..10: note = Description of sequence: Splice site sequence
atggtacgag

SEQ ID NO: 913 - RNA, 10 nt, synthetic construct
  source 1..10: mol_type = other RNA
  misc_feature 1..10: note = Description of sequence: Splice site sequence
atggtacggt

SEQ ID NO: 914 - RNA, 10 nt, synthetic construct
  source 1..10: mol_type = other RNA
  misc_feature 1..10: note = Description of sequence: Splice site sequence
atggtagatc

SEQ ID NO: 915 - RNA, 10 nt, synthetic construct
  source 1..10: mol_type = other RNA
  misc_feature 1..10: note = Description of sequence: Splice site sequence
atggtagcag

SEQ ID NO: 916 - RNA, 10 nt, synthetic construct
  source 1..10: mol_type = other RNA
  misc_feature 1..10: note = Description of sequence: Splice site sequence
atggtagctg

SEQ ID NO: 917 - RNA, 10 nt, synthetic construct
  source 1..10: mol_type = other RNA
  misc_feature 1..10: note = Description of sequence: Splice site sequence
atggtaggaa

SEQ ID NO: 918 - RNA, 10 nt, synthetic construct
  source 1..10: mol_type = other RNA
  misc_feature 1..10: note = Description of sequence: Splice site sequence
atggtaggat

SEQ ID NO: 919 - RNA, 10 nt, synthetic construct
  source 1..10: mol_type = other RNA
  misc_feature 1..10: note = Description of sequence: Splice site sequence
atggtaggca

SEQ ID NO: 920 - RNA, 10 nt, synthetic construct
  source 1..10: mol_type = other RNA
  misc_feature 1..10: note = Description of sequence: Splice site sequence
atggtaggct

SEQ ID NO: 921 - RNA, 10 nt, synthetic construct
  source 1..10: mol_type = other RNA
  misc_feature 1..10: note = Description of sequence: Splice site sequence
atggtagggg

SEQ ID NO: 922 - RNA, 10 nt, synthetic construct
  source 1..10: mol_type = other RNA
  misc_feature 1..10: note = Description of sequence: Splice site sequence
atggtagggt

SEQ ID NO: 923 - RNA, 10 nt, synthetic construct
  source 1..10: mol_type = other RNA
  misc_feature 1..10: note = Description of sequence: Splice site sequence
atggtaggta

SEQ ID NO: 924 - RNA, 10 nt, synthetic construct
  source 1..10: mol_type = other RNA
  misc_feature 1..10: note = Description of sequence: Splice site sequence
atggtaggtg

SEQ ID NO: 925 - RNA, 10 nt, synthetic construct
  source 1..10: mol_type = other RNA
  misc_feature 1..10: note = Description of sequence: Splice site sequence
atggtagttt

SEQ ID NO: 926 - RNA, 10 nt, synthetic construct
  source 1..10: mol_type = other RNA
  misc_feature 1..10: note = Description of sequence: Splice site sequence
atggtatagt

SEQ ID NO: 927 - RNA, 10 nt, synthetic construct
  source 1..10: mol_type = other RNA
  misc_feature 1..10: note = Description of sequence: Splice site sequence
atggtatata

SEQ ID NO: 928 - RNA, 10 nt, synthetic construct
  source 1..10: mol_type = other RNA
  misc_feature 1..10: note = Description of sequence: Splice site sequence
atggtatcag

SEQ ID NO: 929 - RNA, 10 nt, synthetic construct
  source 1..10: mol_type = other RNA
  misc_feature 1..10: note = Description of sequence: Splice site sequence
atggtatctt

SEQ ID NO: 930 - RNA, 10 nt, synthetic construct
  source 1..10: mol_type = other RNA
  misc_feature 1..10: note = Description of sequence: Splice site sequence
atggtatgat

SEQ ID NO: 931 - RNA, 10 nt, synthetic construct
  source 1..10: mol_type = other RNA
  misc_feature 1..10: note = Description of sequence: Splice site sequence
atggtatgca

SEQ ID NO: 932 - RNA, 10 nt, synthetic construct
  source 1..10: mol_type = other RNA
  misc_feature 1..10: note = Description of sequence: Splice site sequence
atggtatgcc

SEQ ID NO: 933 - RNA, 10 nt, synthetic construct
  source 1..10: mol_type = other RNA
  misc_feature 1..10: note = Description of sequence: Splice site sequence
atggtatgcg

SEQ ID NO: 934 - RNA, 10 nt, synthetic construct
  source 1..10: mol_type = other RNA
  misc_feature 1..10: note = Description of sequence: Splice site sequence
atggtatgct

SEQ ID NO: 935 - RNA, 10 nt, synthetic construct
  source 1..10: mol_type = other RNA
  misc_feature 1..10: note = Description of sequence: Splice site sequence
atggtatgga

SEQ ID NO: 936 - RNA, 10 nt, synthetic construct
  source 1..10: mol_type = other RNA
  misc_feature 1..10: note = Description of sequence: Splice site sequence
atggtatggc

SEQ ID NO: 937 - RNA, 10 nt, synthetic construct
  source 1..10: mol_type = other RNA
  misc_feature 1..10: note = Description of sequence: Splice site sequence
atggtatgtg

SEQ ID NO: 938 - RNA, 10 nt, synthetic construct
  source 1..10: mol_type = other RNA
  misc_feature 1..10: note = Description of sequence: Splice site sequence
atggtatgtt

SEQ ID NO: 939 - RNA, 10 nt, synthetic construct
  source 1..10: mol_type = other RNA
  misc_feature 1..10: note = Description of sequence: Splice site sequence
atggtattat

SEQ ID NO: 940 - RNA, 10 nt, synthetic construct
  source 1..10: mol_type = other RNA
  misc_feature 1..10: note = Description of sequence: Splice site sequence
atggtattga

SEQ ID NO: 941 - RNA, 10 nt, synthetic construct
  source 1..10: mol_type = other RNA
  misc_feature 1..10: note = Description of sequence: Splice site sequence
atggtatttg

SEQ ID NO: 942 - RNA, 10 nt, synthetic construct
  source 1..10: mol_type = other RNA
  misc_feature 1..10: note = Description of sequence: Splice site sequence
atggtcaggg

SEQ ID NO: 943 - RNA, 10 nt, synthetic construct
  source 1..10: mol_type = other RNA
  misc_feature 1..10: note = Description of sequence: Splice site sequence
atggtcagtc

SEQ ID NO: 944 - RNA, 10 nt, synthetic construct
  source 1..10: mol_type = other RNA
  misc_feature 1..10: note = Description of sequence: Splice site sequence
atggtcagtg

SEQ ID NO: 945 - RNA, 10 nt, synthetic construct
  source 1..10: mol_type = other RNA
  misc_feature 1..10: note = Description of sequence: Splice site sequence
atggtcattt

SEQ ID NO: 946 - RNA, 10 nt, synthetic construct
  source 1..10: mol_type = other RNA
  misc_feature 1..10: note = Description of sequence: Splice site sequence
atggtgaaaa

SEQ ID NO: 947 - RNA, 10 nt, synthetic construct
  source 1..10: mol_type = other RNA
  misc_feature 1..10: note = Description of sequence: Splice site sequence
atggtgaaac

SEQ ID NO: 948 - RNA, 10 nt, synthetic construct
  source 1..10: mol_type = other RNA
  misc_feature 1..10: note = Description of sequence: Splice site sequence
atggtgaaat

SEQ ID NO: 949 - RNA, 10 nt, synthetic construct
  source 1..10: mol_type = other RNA
  misc_feature 1..10: note = Description of sequence: Splice site sequence
atggtgaact

SEQ ID NO: 950 - RNA, 10 nt, synthetic construct
  source 1..10: mol_type = other RNA
  misc_feature 1..10: note = Description of sequence: Splice site sequence
atggtgaaga

SEQ ID NO: 951 - RNA, 10 nt, synthetic construct
  source 1..10: mol_type = other RNA
  misc_feature 1..10: note = Description of sequence: Splice site sequence
atggtgacgt

SEQ ID NO: 952 - RNA, 10 nt, synthetic construct
  source 1..10: mol_type = other RNA
  misc_feature 1..10: note = Description of sequence: Splice site sequence
atggtgagaa

SEQ ID NO: 953 - RNA, 10 nt, synthetic construct
  source 1..10: mol_type = other RNA
  misc_feature 1..10: note = Description of sequence: Splice site sequence
atggtgagac

SEQ ID NO: 954 - RNA, 10 nt, synthetic construct
  source 1..10: mol_type = other RNA
  misc_feature 1..10: note = Description of sequence: Splice site sequence
atggtgagag

SEQ ID NO: 955 - RNA, 10 nt, synthetic construct
  source 1..10: mol_type = other RNA
  misc_feature 1..10: note = Description of sequence: Splice site sequence
atggtgagca

SEQ ID NO: 956 - RNA, 10 nt, synthetic construct
  source 1..10: mol_type = other RNA
  misc_feature 1..10: note = Description of sequence: Splice site sequence
atggtgagcc

SEQ ID NO: 957 - RNA, 10 nt, synthetic construct
  source 1..10: mol_type = other RNA
  misc_feature 1..10: note = Description of sequence: Splice site sequence
atggtgagcg

SEQ ID NO: 958 - RNA, 10 nt, synthetic construct
  source 1..10: mol_type = other RNA
  misc_feature 1..10: note = Description of sequence: Splice site sequence
atggtgagct

SEQ ID NO: 959 - RNA, 10 nt, synthetic construct
  source 1..10: mol_type = other RNA
  misc_feature 1..10: note = Description of sequence: Splice site sequence
atggtgaggc

SEQ ID NO: 960 - RNA, 10 nt, synthetic construct
  source 1..10: mol_type = other RNA
  misc_feature 1..10: note = Description of sequence: Splice site sequence
atggtgaggg

SEQ ID NO: 961 - RNA, 10 nt, synthetic construct
  source 1..10: mol_type = other RNA
  misc_feature 1..10: note = Description of sequence: Splice site sequence
atggtgagta

SEQ ID NO: 962 - RNA, 10 nt, synthetic construct
  source 1..10: mol_type = other RNA
  misc_feature 1..10: note = Description of sequence: Splice site sequence
atggtgagtc

SEQ ID NO: 963 - RNA, 10 nt, synthetic construct
  source 1..10: mol_type = other RNA
  misc_feature 1..10: note = Description of sequence: Splice site sequence
atggtgagtg

SEQ ID NO: 964 - RNA, 10 nt, synthetic construct
  source 1..10: mol_type = other RNA
  misc_feature 1..10: note = Description of sequence: Splice site sequence
atggtgagtt

SEQ ID NO: 965 - RNA, 10 nt, synthetic construct
  source 1..10: mol_type = other RNA
  misc_feature 1..10: note = Description of sequence: Splice site sequence
atggtgattt

SEQ ID NO: 966 - RNA, 10 nt, synthetic construct
  source 1..10: mol_type = other RNA
  misc_feature 1..10: note = Description of sequence: Splice site sequence
atggtgcgat

SEQ ID NO: 967 - RNA, 10 nt, synthetic construct
  source 1..10: mol_type = other RNA
  misc_feature 1..10: note = Description of sequence: Splice site sequence
atggtgcgtg

SEQ ID NO: 968 - RNA, 10 nt, synthetic construct
  source 1..10: mol_type = other RNA
  misc_feature 1..10: note = Description of sequence: Splice site sequence
atggtgggta

SEQ ID NO: 969 - RNA, 10 nt, synthetic construct
  source 1..10: mol_type = other RNA
  misc_feature 1..10: note = Description of sequence: Splice site sequence
atggtgggtg

SEQ ID NO: 970 - RNA, 10 nt, synthetic construct
  source 1..10: mol_type = other RNA
  misc_feature 1..10: note = Description of sequence: Splice site sequence
atggtgggtt

SEQ ID NO: 971 - RNA, 10 nt, synthetic construct
  source 1..10: mol_type = other RNA
  misc_feature 1..10: note = Description of sequence: Splice site sequence
atggtggtta

SEQ ID NO: 972 - RNA, 10 nt, synthetic construct
  source 1..10: mol_type = other RNA
  misc_feature 1..10: note = Description of sequence: Splice site sequence
atggtgtaag

SEQ ID NO: 973 - RNA, 10 nt, synthetic construct
  source 1..10: mol_type = other RNA
  misc_feature 1..10: note = Description of sequence: Splice site sequence
atggtgtgaa

SEQ ID NO: 974 - RNA, 10 nt, synthetic construct
  source 1..10: mol_type = other RNA
  misc_feature 1..10: note = Description of sequence: Splice site sequence
atggtgtgta

SEQ ID NO: 975 - RNA, 10 nt, synthetic construct
  source 1..10: mol_type = other RNA
  misc_feature 1..10: note = Description of sequence: Splice site sequence
atggtgtgtg

SEQ ID NO: 976 - RNA, 10 nt, synthetic construct
  source 1..10: mol_type = other RNA
  misc_feature 1..10: note = Description of sequence: Splice site sequence
atggttactc

SEQ ID NO: 977 - RNA, 10 nt, synthetic construct
  source 1..10: mol_type = other RNA
  misc_feature 1..10: note = Description of sequence: Splice site sequence
atggttagca

SEQ ID NO: 978 - RNA, 10 nt, synthetic construct
  source 1..10: mol_type = other RNA
  misc_feature 1..10: note = Description of sequence: Splice site sequence
atggttagtc

SEQ ID NO: 979 - RNA, 10 nt, synthetic construct
  source 1..10: mol_type = other RNA
  misc_feature 1..10: note = Description of sequence: Splice site sequence
atggttagtg

SEQ ID NO: 980 - RNA, 10 nt, synthetic construct
  source 1..10: mol_type = other RNA
  misc_feature 1..10: note = Description of sequence: Splice site sequence
atggttagtt

SEQ ID NO: 981 - RNA, 10 nt, synthetic construct
  source 1..10: mol_type = other RNA
  misc_feature 1..10: note = Description of sequence: Splice site sequence
atggttcagt

SEQ ID NO: 982 - RNA, 10 nt, synthetic construct
  source 1..10: mol_type = other RNA
  misc_feature 1..10: note = Description of sequence: Splice site sequence
atggttcgtc

SEQ ID NO: 983 - RNA, 10 nt, synthetic construct
  source 1..10: mol_type = other RNA
  misc_feature 1..10: note = Description of sequence: Splice site sequence
atggttggta

SEQ ID NO: 984 - RNA, 10 nt, synthetic construct
  source 1..10: mol_type = other RNA
  misc_feature 1..10: note = Description of sequence: Splice site sequence
atggttggtc

SEQ ID NO: 985 - RNA, 10 nt, synthetic construct
  source 1..10: mol_type = other RNA
  misc_feature 1..10: note = Description of sequence: Splice site sequence
atggttggtt

SEQ ID NO: 986 - RNA, 10 nt, synthetic construct
  source 1..10: mol_type = other RNA
  misc_feature 1..10: note = Description of sequence: Splice site sequence
atggttgttt

SEQ ID NO: 987 - RNA, 10 nt, synthetic construct
  source 1..10: mol_type = other RNA
  misc_feature 1..10: note = Description of sequence: Splice site sequence
atggtttgca

SEQ ID NO: 988 - RNA, 10 nt, synthetic construct
  source 1..10: mol_type = other RNA
  misc_feature 1..10: note = Description of sequence: Splice site sequence
atggtttgta

SEQ ID NO: 989 - RNA, 10 nt, synthetic construct
  source 1..10: mol_type = other RNA
  misc_feature 1..10: note = Description of sequence: Splice site sequence
attgcaagta

SEQ ID NO: 990 - RNA, 10 nt, synthetic construct
  source 1..10: mol_type = other RNA
  misc_feature 1..10: note = Description of sequence: Splice site sequence
attgtaaata

SEQ ID NO: 991 - RNA, 10 nt, synthetic construct
  source 1..10: mol_type = other RNA
  misc_feature 1..10: note = Description of sequence: Splice site sequence
attgtaagat

SEQ ID NO: 992 - RNA, 10 nt, synthetic construct
  source 1..10: mol_type = other RNA
  misc_feature 1..10: note = Description of sequence: Splice site sequence
attgtaagca

SEQ ID NO: 993 - RNA, 10 nt, synthetic construct
  source 1..10: mol_type = other RNA
  misc_feature 1..10: note = Description of sequence: Splice site sequence
attgtaagga

SEQ ID NO: 994 - RNA, 10 nt, synthetic construct
  source 1..10: mol_type = other RNA
  misc_feature 1..10: note = Description of sequence: Splice site sequence
attgtaaggc

SEQ ID NO: 995 - RNA, 10 nt, synthetic construct
  source 1..10: mol_type = other RNA
  misc_feature 1..10: note = Description of sequence: Splice site sequence
attgtaagta

SEQ ID NO: 996 - RNA, 10 nt, synthetic construct
  source 1..10: mol_type = other RNA
  misc_feature 1..10: note = Description of sequence: Splice site sequence
attgtaagtc

SEQ ID NO: 997 - RNA, 10 nt, synthetic construct
  source 1..10: mol_type = other RNA
  misc_feature 1..10: note = Description of sequence: Splice site sequence
attgtaagtt

SEQ ID NO: 998 - RNA, 10 nt, synthetic construct
  source 1..10: mol_type = other RNA
  misc_feature 1..10: note = Description of sequence: Splice site sequence
attgtaatta

SEQ ID NO: 999 - RNA, 10 nt, synthetic construct
  source 1..10: mol_type = other RNA
  misc_feature 1..10: note = Description of sequence: Splice site sequence
attgtaattt

SEQ ID NO: 1000 - RNA, 10 nt, synthetic construct
  source 1..10: mol_type = other RNA
  misc_feature 1..10: note = Description of sequence: Splice site sequence
attgtacaaa

SEQ ID NO: 1001 - RNA, 10 nt, synthetic construct
  source 1..10: mol_type = other RNA
  misc_feature 1..10: note = Description of sequence: Splice site sequence
attgtacctc

SEQ ID NO: 1002 - RNA, 10 nt, synthetic construct
  source 1..10: mol_type = other RNA
  misc_feature 1..10: note = Description of sequence: Splice site sequence
attgtacgtg

SEQ ID NO: 1003 - RNA, 10 nt, synthetic construct
  source 1..10: mol_type = other RNA
  misc_feature 1..10: note = Description of sequence: Splice site sequence
attgtacttg

SEQ ID NO: 1004 - RNA, 10 nt, synthetic construct
  source 1..10: mol_type = other RNA
  misc_feature 1..10: note = Description of sequence: Splice site sequence
attgtaggta

SEQ ID NO: 1005 - RNA, 10 nt, synthetic construct
  source 1..10: mol_type = other RNA
  misc_feature 1..10: note = Description of sequence: Splice site sequence
attgtatgag

SEQ ID NO: 1006 - RNA, 10 nt, synthetic construct
  source 1..10: mol_type = other RNA
  misc_feature 1..10: note = Description of sequence: Splice site sequence
attgtatgta

SEQ ID NO: 1007 - RNA, 10 nt, synthetic construct
  source 1..10: mol_type = other RNA
  misc_feature 1..10: note = Description of sequence: Splice site sequence
attgtctgtt

SEQ ID NO: 1008 - RNA, 10 nt, synthetic construct
  source 1..10: mol_type = other RNA
  misc_feature 1..10: note = Description of sequence: Splice site sequence
attgtgagct

SEQ ID NO: 1009 - RNA, 10 nt, synthetic construct
  source 1..10: mol_type = other RNA
  misc_feature 1..10: note = Description of sequence: Splice site sequence
attgtgagta

SEQ ID NO: 1010 - RNA, 10 nt, synthetic construct
  source 1..10: mol_type = other RNA
  misc_feature 1..10: note = Description of sequence: Splice site sequence
attgtgagtc

SEQ ID NO: 1011 - RNA, 10 nt, synthetic construct
  source 1..10: mol_type = other RNA
  misc_feature 1..10: note = Description of sequence: Splice site sequence
attgtgagtt

SEQ ID NO: 1012 - RNA, 10 nt, synthetic construct
  source 1..10: mol_type = other RNA
  misc_feature 1..10: note = Description of sequence: Splice site sequence
attgtgcgtg

SEQ ID NO: 1013 - RNA, 10 nt, synthetic construct
  source 1..10: mol_type = other RNA
  misc_feature 1..10: note = Description of sequence: Splice site sequence
attgtgggtg

SEQ ID NO: 1014 - RNA, 10 nt, synthetic construct
  source 1..10: mol_type = other RNA
  misc_feature 1..10: note = Description of sequence: Splice site sequence
attgttagtg

SEQ ID NO: 1015 - RNA, 10 nt, synthetic construct
  source 1..10: mol_type = other RNA
  misc_feature 1..10: note = Description of sequence: Splice site sequence
caagtaaaaa

SEQ ID NO: 1016 - RNA, 10 nt, synthetic construct
  source 1..10: mol_type = other RNA
  misc_feature 1..10: note = Description of sequence: Splice site sequence
caagtaaata

SEQ ID NO: 1017 - RNA, 10 nt, synthetic construct
  source 1..10: mol_type = other RNA
  misc_feature 1..10: note = Description of sequence: Splice site sequence
caagtaaatc

SEQ ID NO: 1018 - RNA, 10 nt, synthetic construct
  source 1..10: mol_type = other RNA
  misc_feature 1..10: note = Description of sequence: Splice site sequence
caagtaaatg

SEQ ID NO: 1019 - RNA, 10 nt, synthetic construct
  source 1..10: mol_type = other RNA
  misc_feature 1..10: note = Description of sequence: Splice site sequence
caagtaaccc

SEQ ID NO: 1020 - RNA, 10 nt, synthetic construct
  source 1..10: mol_type = other RNA
  misc_feature 1..10: note = Description of sequence: Splice site sequence
caagtaacta

SEQ ID NO: 1021 - RNA, 10 nt, synthetic construct
  source 1..10: mol_type = other RNA
  misc_feature 1..10: note = Description of sequence: Splice site sequence
caagtaactg

SEQ ID NO: 1022 - RNA, 10 nt, synthetic construct
  source 1..10: mol_type = other RNA
  misc_feature 1..10: note = Description of sequence: Splice site sequence
caagtaagaa

SEQ ID NO: 1023 - RNA, 10 nt, synthetic construct
  source 1..10: mol_type = other RNA
  misc_feature 1..10: note = Description of sequence: Splice site sequence
caagtaagac

SEQ ID NO: 1024 - RNA, 10 nt, synthetic construct
  source 1..10: mol_type = other RNA
  misc_feature 1..10: note = Description of sequence: Splice site sequence
caagtaagat

SEQ ID NO: 1025 - RNA, 10 nt, synthetic construct
  source 1..10: mol_type = other RNA
  misc_feature 1..10: note = Description of sequence: Splice site sequence
caagtaaggt

SEQ ID NO: 1026 - RNA, 10 nt, synthetic construct
  source 1..10: mol_type = other RNA
  misc_feature 1..10: note = Description of sequence: Splice site sequence
caagtaagta

SEQ ID NO: 1027 - RNA, 10 nt, synthetic construct
  source 1..10: mol_type = other RNA
  misc_feature 1..10: note = Description of sequence: Splice site sequence
caagtaagtc

SEQ ID NO: 1028 - RNA, 10 nt, synthetic construct
  source 1..10: mol_type = other RNA
  misc_feature 1..10: note = Description of sequence: Splice site sequence
caagtaagtg

SEQ ID NO: 1029 - RNA, 10 nt, synthetic construct
  source 1..10: mol_type = other RNA
  misc_feature 1..10: note = Description of sequence: Splice site sequence
caagtaagtt

SEQ ID NO: 1030 - RNA, 10 nt, synthetic construct
  source 1..10: mol_type = other RNA
  misc_feature 1..10: note = Description of sequence: Splice site sequence
caagtaatcc

SEQ ID NO: 1031 - RNA, 10 nt, synthetic construct
  source 1..10: mol_type = other RNA
  misc_feature 1..10: note = Description of sequence: Splice site sequence
caagtaatct

SEQ ID NO: 1032 - RNA, 10 nt, synthetic construct
  source 1..10: mol_type = other RNA
  misc_feature 1..10: note = Description of sequence: Splice site sequence
caagtaatta

SEQ ID NO: 1033 - RNA, 10 nt, synthetic construct
  source 1..10: mol_type = other RNA
  misc_feature 1..10: note = Description of sequence: Splice site sequence
caagtaattc

SEQ ID NO: 1034 - RNA, 10 nt, synthetic construct
  source 1..10: mol_type = other RNA
  misc_feature 1..10: note = Description of sequence: Splice site sequence
caagtaattg

SEQ ID NO: 1035 - RNA, 10 nt, synthetic construct
  source 1..10: mol_type = other RNA
  misc_feature 1..10: note = Description of sequence: Splice site sequence
caagtaattt

SEQ ID NO: 1036 - RNA, 10 nt, synthetic construct
  source 1..10: mol_type = other RNA
  misc_feature 1..10: note = Description of sequence: Splice site sequence
caagtacaca

SEQ ID NO: 1037 - RNA, 10 nt, synthetic construct
  source 1..10: mol_type = other RNA
  misc_feature 1..10: note = Description of sequence: Splice site sequence
caagtacgtt

SEQ ID NO: 1038 - RNA, 10 nt, synthetic construct
  source 1..10: mol_type = other RNA
  misc_feature 1..10: note = Description of sequence: Splice site sequence
caagtacttt

SEQ ID NO: 1039 - RNA, 10 nt, synthetic construct
  source 1..10: mol_type = other RNA
  misc_feature 1..10: note = Description of sequence: Splice site sequence
caagtagctg

SEQ ID NO: 1040 - RNA, 10 nt, synthetic construct
  source 1..10: mol_type = other RNA
  misc_feature 1..10: note = Description of sequence: Splice site sequence
caagtaggat

SEQ ID NO: 1041 - RNA, 10 nt, synthetic construct
  source 1..10: mol_type = other RNA
  misc_feature 1..10: note = Description of sequence: Splice site sequence
caagtaggta

SEQ ID NO: 1042 - RNA, 10 nt, synthetic construct
  source 1..10: mol_type = other RNA
  misc_feature 1..10: note = Description of sequence: Splice site sequence
caagtaggtc

SEQ ID NO: 1043 - RNA, 10 nt, synthetic construct
  source 1..10: mol_type = other RNA
  misc_feature 1..10: note = Description of sequence: Splice site sequence
caagtaggtg

SEQ ID NO: 1044 - RNA, 10 nt, synthetic construct
  source 1..10: mol_type = other RNA
  misc_feature 1..10: note = Description of sequence: Splice site sequence
caagtaggtt

SEQ ID NO: 1045 - RNA, 10 nt, synthetic construct
  source 1..10: mol_type = other RNA
  misc_feature 1..10: note = Description of sequence: Splice site sequence
caagtagttt

SEQ ID NO: 1046 - RNA, 10 nt, synthetic construct
  source 1..10: mol_type = other RNA
  misc_feature 1..10: note = Description of sequence: Splice site sequence
caagtataac

SEQ ID NO: 1047 - RNA, 10 nt, synthetic construct
  source 1..10: mol_type = other RNA
  misc_feature 1..10: note = Description of sequence: Splice site sequence
caagtatatg

SEQ ID NO: 1048 - RNA, 10 nt, synthetic construct
  source 1..10: mol_type = other RNA
  misc_feature 1..10: note = Description of sequence: Splice site sequence
caagtatctt

SEQ ID NO: 1049 - RNA, 10 nt, synthetic construct
  source 1..10: mol_type = other RNA
  misc_feature 1..10: note = Description of sequence: Splice site sequence
caagtatgag

SEQ ID NO: 1050 - RNA, 10 nt, synthetic construct
  source 1..10: mol_type = other RNA
  misc_feature 1..10: note = Description of sequence: Splice site sequence
caagtatgta

SEQ ID NO: 1051 - RNA, 10 nt, synthetic construct
  source 1..10: mol_type = other RNA
  misc_feature 1..10: note = Description of sequence: Splice site sequence
caagtatgtc

SEQ ID NO: 1052 - RNA, 10 nt, synthetic construct
  source 1..10: mol_type = other RNA
  misc_feature 1..10: note = Description of sequence: Splice site sequence
caagtatgtg

SEQ ID NO: 1053 - RNA, 10 nt, synthetic construct
  source 1..10: mol_type = other RNA
  misc_feature 1..10: note = Description of sequence: Splice site sequence
caagtatgtt

SEQ ID NO: 1054 - RNA, 10 nt, synthetic construct
  source 1..10: mol_type = other RNA
  misc_feature 1..10: note = Description of sequence: Splice site sequence
caagtattga

SEQ ID NO: 1055 - RNA, 10 nt, synthetic construct
  source 1..10: mol_type = other RNA
  misc_feature 1..10: note = Description of sequence: Splice site sequence
caagtatttc

SEQ ID NO: 1056 - RNA, 10 nt, synthetic construct
  source 1..10: mol_type = other RNA
  misc_feature 1..10: note = Description of sequence: Splice site sequence
caagtcagac

SEQ ID NO: 1057 - RNA, 10 nt, synthetic construct
  source 1..10: mol_type = other RNA
  misc_feature 1..10: note = Description of sequence: Splice site sequence
caagtcagta

SEQ ID NO: 1058 - RNA, 10 nt, synthetic construct
  source 1..10: mol_type = other RNA
  misc_feature 1..10: note = Description of sequence: Splice site sequence
caagtctata

SEQ ID NO: 1059 - RNA, 10 nt, synthetic construct
  source 1..10: mol_type = other RNA
  misc_feature 1..10: note = Description of sequence: Splice site sequence
caagtctgat

SEQ ID NO: 1060 - RNA, 10 nt, synthetic construct
  source 1..10: mol_type = other RNA
  misc_feature 1..10: note = Description of sequence: Splice site sequence
caagtgactt

SEQ ID NO: 1061 - RNA, 10 nt, synthetic construct
  source 1..10: mol_type = other RNA
  misc_feature 1..10: note = Description of sequence: Splice site sequence
caagtgagaa

SEQ ID NO: 1062 - RNA, 10 nt, synthetic construct
  source 1..10: mol_type = other RNA
  misc_feature 1..10: note = Description of sequence: Splice site sequence
caagtgagac

SEQ ID NO: 1063 - RNA, 10 nt, synthetic construct
  source 1..10: mol_type = other RNA
  misc_feature 1..10: note = Description of sequence: Splice site sequence
caagtgagca

SEQ ID NO: 1064 - RNA, 10 nt, synthetic construct
  source 1..10: mol_type = other RNA
  misc_feature 1..10: note = Description of sequence: Splice site sequence
caagtgaggc

SEQ ID NO: 1065 - RNA, 10 nt, synthetic construct
  source 1..10: mol_type = other RNA
  misc_feature 1..10: note = Description of sequence: Splice site sequence
caagtgaggg

SEQ ID NO: 1066 - RNA, 10 nt, synthetic construct
  source 1..10: mol_type = other RNA
  misc_feature 1..10: note = Description of sequence: Splice site sequence
caagtgagta

SEQ ID NO: 1067 - RNA, 10 nt, synthetic construct
  source 1..10: mol_type = other RNA
  misc_feature 1..10: note = Description of sequence: Splice site sequence
caagtgagtc

SEQ ID NO: 1068 - RNA, 10 nt, synthetic construct
  source 1..10: mol_type = other RNA
  misc_feature 1..10: note = Description of sequence: Splice site sequence
caagtgagtg

SEQ ID NO: 1069 - RNA, 10 nt, synthetic construct
  source 1..10: mol_type = other RNA
  misc_feature 1..10: note = Description of sequence: Splice site sequence
caagtgatcc

SEQ ID NO: 1070 - RNA, 10 nt, synthetic construct
  source 1..10: mol_type = other RNA
  misc_feature 1..10: note = Description of sequence: Splice site sequence
caagtgatct

SEQ ID NO: 1071 - RNA, 10 nt, synthetic construct
  source 1..10: mol_type = other RNA
  misc_feature 1..10: note = Description of sequence: Splice site sequence
caagtgattc

SEQ ID NO: 1072 - RNA, 10 nt, synthetic construct
  source 1..10: mol_type = other RNA
  misc_feature 1..10: note = Description of sequence: Splice site sequence
caagtgattg

SEQ ID NO: 1073 - RNA, 10 nt, synthetic construct
  source 1..10: mol_type = other RNA
  misc_feature 1..10: note = Description of sequence: Splice site sequence
caagtgattt

SEQ ID NO: 1074 - RNA, 10 nt, synthetic construct
  source 1..10: mol_type = other RNA
  misc_feature 1..10: note = Description of sequence: Splice site sequence
caagtgcctt

SEQ ID NO: 1075 - RNA, 10 nt, synthetic construct
  source 1..10: mol_type = other RNA
  misc_feature 1..10: note = Description of sequence: Splice site sequence
caagtgggta

SEQ ID NO: 1076 - RNA, 10 nt, synthetic construct
  source 1..10: mol_type = other RNA
  misc_feature 1..10: note = Description of sequence: Splice site sequence
caagtgggtc

SEQ ID NO: 1077 - RNA, 10 nt, synthetic construct
  source 1..10: mol_type = other RNA
  misc_feature 1..10: note = Description of sequence: Splice site sequence
caagtgggtg

SEQ ID NO: 1078 - RNA, 10 nt, synthetic construct
  source 1..10: mol_type = other RNA
  misc_feature 1..10: note = Description of sequence: Splice site sequence
caagtgtgag

SEQ ID NO: 1079 - RNA, 10 nt, synthetic construct
  source 1..10: mol_type = other RNA
  misc_feature 1..10: note = Description of sequence: Splice site sequence
caagttaaaa

SEQ ID NO: 1080 - RNA, 10 nt, synthetic construct
  source 1..10: mol_type = other RNA
  misc_feature 1..10: note = Description of sequence: Splice site sequence
caagttaagt

SEQ ID NO: 1081 - RNA, 10 nt, synthetic construct
  source 1..10: mol_type = other RNA
  misc_feature 1..10: note = Description of sequence: Splice site sequence
caagttaatc

SEQ ID NO: 1082 - RNA, 10 nt, synthetic construct
  source 1..10: mol_type = other RNA
  misc_feature 1..10: note = Description of sequence: Splice site sequence
caagttagaa

SEQ ID NO: 1083 - RNA, 10 nt, synthetic construct
  source 1..10: mol_type = other RNA
  misc_feature 1..10: note = Description of sequence: Splice site sequence
caagttagtt

SEQ ID NO: 1084 - RNA, 10 nt, synthetic construct
  source 1..10: mol_type = other RNA
  misc_feature 1..10: note = Description of sequence: Splice site sequence
caagttcaag

SEQ ID NO: 1085 - RNA, 10 nt, synthetic construct
  source 1..10: mol_type = other RNA
  misc_feature 1..10: note = Description of sequence: Splice site sequence
caagttccgt

SEQ ID NO: 1086 - RNA, 10 nt, synthetic construct
  source 1..10: mol_type = other RNA
  misc_feature 1..10: note = Description of sequence: Splice site sequence
caagttggta

SEQ ID NO: 1087 - RNA, 10 nt, synthetic construct
  source 1..10: mol_type = other RNA
  misc_feature 1..10: note = Description of sequence: Splice site sequence
caagtttagt

SEQ ID NO: 1088 - RNA, 10 nt, synthetic construct
  source 1..10: mol_type = other RNA
  misc_feature 1..10: note = Description of sequence: Splice site sequence
caagtttcca

SEQ ID NO: 1089 - RNA, 10 nt, synthetic construct
  source 1..10: mol_type = other RNA
  misc_feature 1..10: note = Description of sequence: Splice site sequence
caagtttgtt

SEQ ID NO: 1090 - RNA, 10 nt, synthetic construct
  source 1..10: mol_type = other RNA
  misc_feature 1..10: note = Description of sequence: Splice site sequence
cacgtaagag

SEQ ID NO: 1091 - RNA, 10 nt, synthetic construct
  source 1..10: mol_type = other RNA
  misc_feature 1..10: note = Description of sequence: Splice site sequence
cacgtaagca

SEQ ID NO: 1092 - RNA, 10 nt, synthetic construct
  source 1..10: mol_type = other RNA
  misc_feature 1..10: note = Description of sequence: Splice site sequence
cacgtaattg

SEQ ID NO: 1093 - RNA, 10 nt, synthetic construct
  source 1..10: mol_type = other RNA
  misc_feature 1..10: note = Description of sequence: Splice site sequence
cacgtaggac

SEQ ID NO: 1094 - RNA, 10 nt, synthetic construct
  source 1..10: mol_type = other RNA
  misc_feature 1..10: note = Description of sequence: Splice site sequence
cacgtatcga

SEQ ID NO: 1095 - RNA, 10 nt, synthetic construct
  source 1..10: mol_type = other RNA
  misc_feature 1..10: note = Description of sequence: Splice site sequence
cacgtcagtt

SEQ ID NO: 1096 - RNA, 10 nt, synthetic construct
  source 1..10: mol_type = other RNA
  misc_feature 1..10: note = Description of sequence: Splice site sequence
cacgtgagct

SEQ ID NO: 1097 - RNA, 10 nt, synthetic construct
  source 1..10: mol_type = other RNA
  misc_feature 1..10: note = Description of sequence: Splice site sequence
cacgtgagtc

SEQ ID NO: 1098 - RNA, 10 nt, synthetic construct
  source 1..10: mol_type = other RNA
  misc_feature 1..10: note = Description of sequence: Splice site sequence
cacgtgagtg

SEQ ID NO: 1099 - RNA, 10 nt, synthetic construct
  source 1..10: mol_type = other RNA
  misc_feature 1..10: note = Description of sequence: Splice site sequence
caggcaagaa

SEQ ID NO: 1100 - RNA, 10 nt, synthetic construct
  source 1..10: mol_type = other RNA
  misc_feature 1..10: note = Description of sequence: Splice site sequence
caggcaagac

SEQ ID NO: 1101 - RNA, 10 nt, synthetic construct
  source 1..10: mol_type = other RNA
  misc_feature 1..10: note = Description of sequence: Splice site sequence
caggcaagag

SEQ ID NO: 1102 - RNA, 10 nt, synthetic construct
  source 1..10: mol_type = other RNA
  misc_feature 1..10: note = Description of sequence: Splice site sequence
caggcaagga

SEQ ID NO: 1103 - RNA, 10 nt, synthetic construct
  source 1..10: mol_type = other RNA
  misc_feature 1..10: note = Description of sequence: Splice site sequence
caggcaagta

SEQ ID NO: 1104 - RNA, 10 nt, synthetic construct
  source 1..10: mol_type = other RNA
  misc_feature 1..10: note = Description of sequence: Splice site sequence
caggcaagtg

SEQ ID NO: 1105 - RNA, 10 nt, synthetic construct
  source 1..10: mol_type = other RNA
  misc_feature 1..10: note = Description of sequence: Splice site sequence
caggcaagtt

SEQ ID NO: 1106 - RNA, 10 nt, synthetic construct
  source 1..10: mol_type = other RNA
  misc_feature 1..10: note = Description of sequence: Splice site sequence
caggcacgca

SEQ ID NO: 1107 - RNA, 10 nt, synthetic construct
  source 1..10: mol_type = other RNA
  misc_feature 1..10: note = Description of sequence: Splice site sequence
caggcagagg

SEQ ID NO: 1108 - RNA, 10 nt, synthetic construct
  source 1..10: mol_type = other RNA
  misc_feature 1..10: note = Description of sequence: Splice site sequence
caggcaggtg

SEQ ID NO: 1109 - RNA, 10 nt, synthetic construct
  source 1..10: mol_type = other RNA
  misc_feature 1..10: note = Description of sequence: Splice site sequence
caggcatcat

SEQ ID NO: 1110 - RNA, 10 nt, synthetic construct
  source 1..10: mol_type = other RNA
  misc_feature 1..10: note = Description of sequence: Splice site sequence
caggcatgaa

SEQ ID NO: 1111 - RNA, 10 nt, synthetic construct
  source 1..10: mol_type = other RNA
  misc_feature 1..10: note = Description of sequence: Splice site sequence
caggcatgag

SEQ ID NO: 1112 - RNA, 10 nt, synthetic construct
  source 1..10: mol_type = other RNA
  misc_feature 1..10: note = Description of sequence: Splice site sequence
caggcatgca

SEQ ID NO: 1113 - RNA, 10 nt, synthetic construct
  source 1..10: mol_type = other RNA
  misc_feature 1..10: note = Description of sequence: Splice site sequence
caggcatgcg

SEQ ID NO: 1114 - RNA, 10 nt, synthetic construct
  source 1..10: mol_type = other RNA
  misc_feature 1..10: note = Description of sequence: Splice site sequence
caggcatgtg

SEQ ID NO: 1115 - RNA, 10 nt, synthetic construct
  source 1..10: mol_type = other RNA
  misc_feature 1..10: note = Description of sequence: Splice site sequence
caggcgagag

SEQ ID NO: 1116 - RNA, 10 nt, synthetic construct
  source 1..10: mol_type = other RNA
  misc_feature 1..10: note = Description of sequence: Splice site sequence
caggcgcctg

SEQ ID NO: 1117 - RNA, 10 nt, synthetic construct
  source 1..10: mol_type = other RNA
  misc_feature 1..10: note = Description of sequence: Splice site sequence
caggcgtgtg

SEQ ID NO: 1118 - RNA, 10 nt, synthetic construct
  source 1..10: mol_type = other RNA
  misc_feature 1..10: note = Description of sequence: Splice site sequence
caggtaaaaa

SEQ ID NO: 1119 - RNA, 10 nt, synthetic construct
  source 1..10: mol_type = other RNA
  misc_feature 1..10: note = Description of sequence: Splice site sequence
caggtaaaag

SEQ ID NO: 1120 - RNA, 10 nt, synthetic construct
  source 1..10: mol_type = other RNA
  misc_feature 1..10: note = Description of sequence: Splice site sequence
caggtaaaca

SEQ ID NO: 1121 - RNA, 10 nt, synthetic construct
  source 1..10: mol_type = other RNA
  misc_feature 1..10: note = Description of sequence: Splice site sequence
caggtaaacc

SEQ ID NO: 1122 - RNA, 10 nt, synthetic construct
  source 1..10: mol_type = other RNA
  misc_feature 1..10: note = Description of sequence: Splice site sequence
caggtaaaga

SEQ ID NO: 1123 - RNA, 10 nt, synthetic construct
  source 1..10: mol_type = other RNA
  misc_feature 1..10: note = Description of sequence: Splice site sequence
caggtaaagc

SEQ ID NO: 1124 - RNA, 10 nt, synthetic construct
  source 1..10: mol_type = other RNA
  misc_feature 1..10: note = Description of sequence: Splice site sequence
caggtaaagt

SEQ ID NO: 1125 - RNA, 10 nt, synthetic construct
  source 1..10: mol_type = other RNA
  misc_feature 1..10: note = Description of sequence: Splice site sequence
caggtaaata

SEQ ID NO: 1126 - RNA, 10 nt, synthetic construct
  source 1..10: mol_type = other RNA
  misc_feature 1..10: note = Description of sequence: Splice site sequence
caggtaaatc

SEQ ID NO: 1127 - RNA, 10 nt, synthetic construct
  source 1..10: mol_type = other RNA
  misc_feature 1..10: note = Description of sequence: Splice site sequence
caggtaaatg

SEQ ID NO: 1128 - RNA, 10 nt, synthetic construct
  source 1..10: mol_type = other RNA
  misc_feature 1..10: note = Description of sequence: Splice site sequence
caggtaaatt

SEQ ID NO: 1129 - RNA, 10 nt, synthetic construct
  source 1..10: mol_type = other RNA
  misc_feature 1..10: note = Description of sequence: Splice site sequence
caggtaacag

SEQ ID NO: 1130 - RNA, 10 nt, synthetic construct
  source 1..10: mol_type = other RNA
  misc_feature 1..10: note = Description of sequence: Splice site sequence
caggtaacat

SEQ ID NO: 1131 - RNA, 10 nt, synthetic construct
  source 1..10: mol_type = other RNA
  misc_feature 1..10: note = Description of sequence: Splice site sequence
caggtaacca

SEQ ID NO: 1132 - RNA, 10 nt, synthetic construct
  source 1..10: mol_type = other RNA
  misc_feature 1..10: note = Description of sequence: Splice site sequence
caggtaaccg

SEQ ID NO: 1133 - RNA, 10 nt, synthetic construct
  source 1..10: mol_type = other RNA
  misc_feature 1..10: note = Description of sequence: Splice site sequence
caggtaacgt

SEQ ID NO: 1134 - RNA, 10 nt, synthetic construct
  source 1..10: mol_type = other RNA
  misc_feature 1..10: note = Description of sequence: Splice site sequence
caggtaacta

SEQ ID NO: 1135 - RNA, 10 nt, synthetic construct
  source 1..10: mol_type = other RNA
  misc_feature 1..10: note = Description of sequence: Splice site sequence
caggtaactc

SEQ ID NO: 1136 - RNA, 10 nt, synthetic construct
  source 1..10: mol_type = other RNA
  misc_feature 1..10: note = Description of sequence: Splice site sequence
caggtaactg

SEQ ID NO: 1137 - RNA, 10 nt, synthetic construct
  source 1..10: mol_type = other RNA
  misc_feature 1..10: note = Description of sequence: Splice site sequence
caggtaactt

SEQ ID NO: 1138 - RNA, 10 nt, synthetic construct
  source 1..10: mol_type = other RNA
  misc_feature 1..10: note = Description of sequence: Splice site sequence
caggtaagaa

SEQ ID NO: 1139 - RNA, 10 nt, synthetic construct
  source 1..10: mol_type = other RNA
  misc_feature 1..10: note = Description of sequence: Splice site sequence
caggtaagac

SEQ ID NO: 1140 - RNA, 10 nt, synthetic construct
  source 1..10: mol_type = other RNA
  misc_feature 1..10: note = Description of sequence: Splice site sequence
caggtaagag

SEQ ID NO: 1141 - RNA, 10 nt, synthetic construct
  source 1..10: mol_type = other RNA
  misc_feature 1..10: note = Description of sequence: Splice site sequence
caggtaagat

SEQ ID NO: 1142 - RNA, 10 nt, synthetic construct
  source 1..10: mol_type = other RNA
  misc_feature 1..10: note = Description of sequence: Splice site sequence
caggtaagcc

SEQ ID NO: 1143 - RNA, 10 nt, synthetic construct
  source 1..10: mol_type = other RNA
  misc_feature 1..10: note = Description of sequence: Splice site sequence
caggtaagga

SEQ ID NO: 1144 - RNA, 10 nt, synthetic construct
  source 1..10: mol_type = other RNA
  misc_feature 1..10: note = Description of sequence: Splice site sequence
caggtaaggc

SEQ ID NO: 1145 - RNA, 10 nt, synthetic construct
  source 1..10: mol_type = other RNA
  misc_feature 1..10: note = Description of sequence: Splice site sequence
caggtaaggg

SEQ ID NO: 1146 - RNA, 10 nt, synthetic construct
  source 1..10: mol_type = other RNA
  misc_feature 1..10: note = Description of sequence: Splice site sequence
caggtaaggt

SEQ ID NO: 1147 - RNA, 10 nt, synthetic construct
  source 1..10: mol_type = other RNA
  misc_feature 1..10: note = Description of sequence: Splice site sequence
caggtaagta

SEQ ID NO: 1148 - RNA, 10 nt, synthetic construct
  source 1..10: mol_type = other RNA
  misc_feature 1..10: note = Description of sequence: Splice site sequence
caggtaagtg

SEQ ID NO: 1149 - RNA, 10 nt, synthetic construct
  source 1..10: mol_type = other RNA
  misc_feature 1..10: note = Description of sequence: Splice site sequence
caggtaagtt

SEQ ID NO: 1150 - RNA, 10 nt, synthetic construct
  source 1..10: mol_type = other RNA
  misc_feature 1..10: note = Description of sequence: Splice site sequence
caggtaataa

SEQ ID NO: 1151 - RNA, 10 nt, synthetic construct
  source 1..10: mol_type = other RNA
  misc_feature 1..10: note = Description of sequence: Splice site sequence
caggtaatat

SEQ ID NO: 1152 - RNA, 10 nt, synthetic construct
  source 1..10: mol_type = other RNA
  misc_feature 1..10: note = Description of sequence: Splice site sequence
caggtaatcc

SEQ ID NO: 1153 - RNA, 10 nt, synthetic construct
  source 1..10: mol_type = other RNA
  misc_feature 1..10: note = Description of sequence: Splice site sequence
caggtaatgc

SEQ ID NO: 1154 - RNA, 10 nt, synthetic construct
  source 1..10: mol_type = other RNA
  misc_feature 1..10: note = Description of sequence: Splice site sequence
caggtaatgg

SEQ ID NO: 1155 - RNA, 10 nt, synthetic construct
  source 1..10: mol_type = other RNA
  misc_feature 1..10: note = Description of sequence: Splice site sequence
caggtaatgt

SEQ ID NO: 1156 - RNA, 10 nt, synthetic construct
  source 1..10: mol_type = other RNA
  misc_feature 1..10: note = Description of sequence: Splice site sequence
caggtaatta

SEQ ID NO: 1157 - RNA, 10 nt, synthetic construct
  source 1..10: mol_type = other RNA
  misc_feature 1..10: note = Description of sequence: Splice site sequence
caggtaattc

SEQ ID NO: 1158 - RNA, 10 nt, synthetic construct
  source 1..10: mol_type = other RNA
  misc_feature 1..10: note = Description of sequence: Splice site sequence
caggtaattg

SEQ ID NO: 1159 - RNA, 10 nt, synthetic construct
  source 1..10: mol_type = other RNA
  misc_feature 1..10: note = Description of sequence: Splice site sequence
caggtaattt

SEQ ID NO: 1160 - RNA, 10 nt, synthetic construct
  source 1..10: mol_type = other RNA
  misc_feature 1..10: note = Description of sequence: Splice site sequence
caggtacaaa

SEQ ID NO: 1161 - RNA, 10 nt, synthetic construct
  source 1..10: mol_type = other RNA
  misc_feature 1..10: note = Description of sequence: Splice site sequence
caggtacaag

SEQ ID NO: 1162 - RNA, 10 nt, synthetic construct
  source 1..10: mol_type = other RNA
  misc_feature 1..10: note = Description of sequence: Splice site sequence
caggtacaat

SEQ ID NO: 1163 - RNA, 10 nt, synthetic construct
  source 1..10: mol_type = other RNA
  misc_feature 1..10: note = Description of sequence: Splice site sequence
caggtacaca

SEQ ID NO: 1164 - RNA, 10 nt, synthetic construct
  source 1..10: mol_type = other RNA
  misc_feature 1..10: note = Description of sequence: Splice site sequence
caggtacacg

SEQ ID NO: 1165 - RNA, 10 nt, synthetic construct
  source 1..10: mol_type = other RNA
  misc_feature 1..10: note = Description of sequence: Splice site sequence
caggtacaga

SEQ ID NO: 1166 - RNA, 10 nt, synthetic construct
  source 1..10: mol_type = other RNA
  misc_feature 1..10: note = Description of sequence: Splice site sequence
caggtacagg

SEQ ID NO: 1167 - RNA, 10 nt, synthetic construct
  source 1..10: mol_type = other RNA
  misc_feature 1..10: note = Description of sequence: Splice site sequence
caggtacagt

SEQ ID NO: 1168 - RNA, 10 nt, synthetic construct
  source 1..10: mol_type = other RNA
  misc_feature 1..10: note = Description of sequence: Splice site sequence
caggtacata

SEQ ID NO: 1169 - RNA, 10 nt, synthetic construct
  source 1..10: mol_type = other RNA
  misc_feature 1..10: note = Description of sequence: Splice site sequence
caggtacatg

SEQ ID NO: 1170 - RNA, 10 nt, synthetic construct
  source 1..10: mol_type = other RNA
  misc_feature 1..10: note = Description of sequence: Splice site sequence
caggtacatt

SEQ ID NO: 1171 - RNA, 10 nt, synthetic construct
  source 1..10: mol_type = other RNA
  misc_feature 1..10: note = Description of sequence: Splice site sequence
caggtaccac

SEQ ID NO: 1172 - RNA, 10 nt, synthetic construct
  source 1..10: mol_type = other RNA
  misc_feature 1..10: note = Description of sequence: Splice site sequence
caggtaccca

SEQ ID NO: 1173 - RNA, 10 nt, synthetic construct
  source 1..10: mol_type = other RNA
  misc_feature 1..10: note = Description of sequence: Splice site sequence
caggtacccg

SEQ ID NO: 1174 - RNA, 10 nt, synthetic construct
  source 1..10: mol_type = other RNA
  misc_feature 1..10: note = Description of sequence: Splice site sequence
caggtaccct

SEQ ID NO: 1175 - RNA, 10 nt, synthetic construct
  source 1..10: mol_type = other RNA
  misc_feature 1..10: note = Description of sequence: Splice site sequence
caggtaccgc

SEQ ID NO: 1176 - RNA, 10 nt, synthetic construct
  source 1..10: mol_type = other RNA
  misc_feature 1..10: note = Description of sequence: Splice site sequence
caggtaccgg

SEQ ID NO: 1177 - RNA, 10 nt, synthetic construct
  source 1..10: mol_type = other RNA
  misc_feature 1..10: note = Description of sequence: Splice site sequence
caggtacctc

SEQ ID NO: 1178 - RNA, 10 nt, synthetic construct
  source 1..10: mol_type = other RNA
  misc_feature 1..10: note = Description of sequence: Splice site sequence
caggtacctg

SEQ ID NO: 1179 - RNA, 10 nt, synthetic construct
  source 1..10: mol_type = other RNA
  misc_feature 1..10: note = Description of sequence: Splice site sequence
caggtacctt

SEQ ID NO: 1180 - RNA, 10 nt, synthetic construct
  source 1..10: mol_type = other RNA
  misc_feature 1..10: note = Description of sequence: Splice site sequence
caggtacgag

SEQ ID NO: 1181 - RNA, 10 nt, synthetic construct
  source 1..10: mol_type = other RNA
  misc_feature 1..10: note = Description of sequence: Splice site sequence
caggtacgca

SEQ ID NO: 1182 - RNA, 10 nt, synthetic construct
  source 1..10: mol_type = other RNA
  misc_feature 1..10: note = Description of sequence: Splice site sequence
caggtacgcc

SEQ ID NO: 1183 - RNA, 10 nt, synthetic construct
  source 1..10: mol_type = other RNA
  misc_feature 1..10: note = Description of sequence: Splice site sequence
caggtacggt

SEQ ID NO: 1184 - RNA, 10 nt, synthetic construct
  source 1..10: mol_type = other RNA
  misc_feature 1..10: note = Description of sequence: Splice site sequence
caggtacgta

SEQ ID NO: 1185 - RNA, 10 nt, synthetic construct
  source 1..10: mol_type = other RNA
  misc_feature 1..10: note = Description of sequence: Splice site sequence
caggtacgtg

SEQ ID NO: 1186 - RNA, 10 nt, synthetic construct
  source 1..10: mol_type = other RNA
  misc_feature 1..10: note = Description of sequence: Splice site sequence
caggtactaa

SEQ ID NO: 1187 - RNA, 10 nt, synthetic construct
  source 1..10: mol_type = other RNA
  misc_feature 1..10: note = Description of sequence: Splice site sequence
caggtactag

SEQ ID NO: 1188 - RNA, 10 nt, synthetic construct
  source 1..10: mol_type = other RNA
  misc_feature 1..10: note = Description of sequence: Splice site sequence
caggtactat

SEQ ID NO: 1189 - RNA, 10 nt, synthetic construct
  source 1..10: mol_type = other RNA
  misc_feature 1..10: note = Description of sequence: Splice site sequence
caggtactcc

SEQ ID NO: 1190 - RNA, 10 nt, synthetic construct
  source 1..10: mol_type = other RNA
  misc_feature 1..10: note = Description of sequence: Splice site sequence
caggtactct

SEQ ID NO: 1191 - RNA, 10 nt, synthetic construct
  source 1..10: mol_type = other RNA
  misc_feature 1..10: note = Description of sequence: Splice site sequence
caggtactga

SEQ ID NO: 1192 - RNA, 10 nt, synthetic construct
  source 1..10: mol_type = other RNA
  misc_feature 1..10: note = Description of sequence: Splice site sequence
caggtactgc

SEQ ID NO: 1193 - RNA, 10 nt, synthetic construct
  source 1..10: mol_type = other RNA
  misc_feature 1..10: note = Description of sequence: Splice site sequence
caggtactgt

SEQ ID NO: 1194 - RNA, 10 nt, synthetic construct
  source 1..10: mol_type = other RNA
  misc_feature 1..10: note = Description of sequence: Splice site sequence
caggtactta

SEQ ID NO: 1195 - RNA, 10 nt, synthetic construct
  source 1..10: mol_type = other RNA
  misc_feature 1..10: note = Description of sequence: Splice site sequence
caggtacttt

SEQ ID NO: 1196 - RNA, 10 nt, synthetic construct
  source 1..10: mol_type = other RNA
  misc_feature 1..10: note = Description of sequence: Splice site sequence
caggtagaaa

SEQ ID NO: 1197 - RNA, 10 nt, synthetic construct
  source 1..10: mol_type = other RNA
  misc_feature 1..10: note = Description of sequence: Splice site sequence
caggtagaac

SEQ ID NO: 1198 - RNA, 10 nt, synthetic construct
  source 1..10: mol_type = other RNA
  misc_feature 1..10: note = Description of sequence: Splice site sequence
caggtagaag

SEQ ID NO: 1199 - RNA, 10 nt, synthetic construct
  source 1..10: mol_type = other RNA
  misc_feature 1..10: note = Description of sequence: Splice site sequence
caggtagaca

SEQ ID NO: 1200 - RNA, 10 nt, synthetic construct
  source 1..10: mol_type = other RNA
  misc_feature 1..10: note = Description of sequence: Splice site sequence
caggtagacc

SEQ ID NO: 1201 - RNA, 10 nt, synthetic construct
  source 1..10: mol_type = other RNA
  misc_feature 1..10: note = Description of sequence: Splice site sequence
caggtagaga

SEQ ID NO: 1202 - RNA, 10 nt, synthetic construct
  source 1..10: mol_type = other RNA
  misc_feature 1..10: note = Description of sequence: Splice site sequence
caggtagatt

SEQ ID NO: 1203 - RNA, 10 nt, synthetic construct
  source 1..10: mol_type = other RNA
  misc_feature 1..10: note = Description of sequence: Splice site sequence
caggtagcaa

SEQ ID NO: 1204 - RNA, 10 nt, synthetic construct
  source 1..10: mol_type = other RNA
  misc_feature 1..10: note = Description of sequence: Splice site sequence
caggtagcac

SEQ ID NO: 1205 - RNA, 10 nt, synthetic construct
  source 1..10: mol_type = other RNA
  misc_feature 1..10: note = Description of sequence: Splice site sequence
caggtagcag

SEQ ID NO: 1206 - RNA, 10 nt, synthetic construct
  source 1..10: mol_type = other RNA
  misc_feature 1..10: note = Description of sequence: Splice site sequence
caggtagcca

SEQ ID NO: 1207 - RNA, 10 nt, synthetic construct
  source 1..10: mol_type = other RNA
  misc_feature 1..10: note = Description of sequence: Splice site sequence
caggtagcgt

SEQ ID NO: 1208 - RNA, 10 nt, synthetic construct
  source 1..10: mol_type = other RNA
  misc_feature 1..10: note = Description of sequence: Splice site sequence
caggtagcta

SEQ ID NO: 1209 - RNA, 10 nt, synthetic construct
  source 1..10: mol_type = other RNA
  misc_feature 1..10: note = Description of sequence: Splice site sequence
caggtagctc

SEQ ID NO: 1210 - RNA, 10 nt, synthetic construct
  source 1..10: mol_type = other RNA
  misc_feature 1..10: note = Description of sequence: Splice site sequence
caggtagctg

SEQ ID NO: 1211 - RNA, 10 nt, synthetic construct
  source 1..10: mol_type = other RNA
  misc_feature 1..10: note = Description of sequence: Splice site sequence
caggtagctt

SEQ ID NO: 1212 - RNA, 10 nt, synthetic construct
  source 1..10: mol_type = other RNA
  misc_feature 1..10: note = Description of sequence: Splice site sequence
caggtaggaa

SEQ ID NO: 1213 - RNA, 10 nt, synthetic construct
  source 1..10: mol_type = other RNA
  misc_feature 1..10: note = Description of sequence: Splice site sequence
caggtaggac

SEQ ID NO: 1214 - RNA, 10 nt, synthetic construct
  source 1..10: mol_type = other RNA
  misc_feature 1..10: note = Description of sequence: Splice site sequence
caggtaggag

SEQ ID NO: 1215 - RNA, 10 nt, synthetic construct
  source 1..10: mol_type = other RNA
  misc_feature 1..10: note = Description of sequence: Splice site sequence
caggtaggca

SEQ ID NO: 1216 - RNA, 10 nt, synthetic construct
  source 1..10: mol_type = other RNA
  misc_feature 1..10: note = Description of sequence: Splice site sequence
caggtaggga

SEQ ID NO: 1217 - RNA, 10 nt, synthetic construct
  source 1..10: mol_type = other RNA
  misc_feature 1..10: note = Description of sequence: Splice site sequence
caggtagggc

SEQ ID NO: 1218 - RNA, 10 nt, synthetic construct
  source 1..10: mol_type = other RNA
  misc_feature 1..10: note = Description of sequence: Splice site sequence
caggtagggg

SEQ ID NO: 1219 - RNA, 10 nt, synthetic construct
  source 1..10: mol_type = other RNA
  misc_feature 1..10: note = Description of sequence: Splice site sequence
caggtagggt

SEQ ID NO: 1220 - RNA, 10 nt, synthetic construct
  source 1..10: mol_type = other RNA
  misc_feature 1..10: note = Description of sequence: Splice site sequence
caggtaggta

SEQ ID NO: 1221 - RNA, 10 nt, synthetic construct
  source 1..10: mol_type = other RNA
  misc_feature 1..10: note = Description of sequence: Splice site sequence
caggtaggtc

SEQ ID NO: 1222 - RNA, 10 nt, synthetic construct
  source 1..10: mol_type = other RNA
  misc_feature 1..10: note = Description of sequence: Splice site sequence
caggtaggtg

SEQ ID NO: 1223 - RNA, 10 nt, synthetic construct
  source 1..10: mol_type = other RNA
  misc_feature 1..10: note = Description of sequence: Splice site sequence
caggtaggtt

SEQ ID NO: 1224 - RNA, 10 nt, synthetic construct
  source 1..10: mol_type = other RNA
  misc_feature 1..10: note = Description of sequence: Splice site sequence
caggtagtaa

SEQ ID NO: 1225 - RNA, 10 nt, synthetic construct
  source 1..10: mol_type = other RNA
  misc_feature 1..10: note = Description of sequence: Splice site sequence
caggtagtat

SEQ ID NO: 1226 - RNA, 10 nt, synthetic construct
  source 1..10: mol_type = other RNA
  misc_feature 1..10: note = Description of sequence: Splice site sequence
caggtagtca

SEQ ID NO: 1227 - RNA, 10 nt, synthetic construct
  source 1..10: mol_type = other RNA
  misc_feature 1..10: note = Description of sequence: Splice site sequence
caggtagtcc

SEQ ID NO: 1228 - RNA, 10 nt, synthetic construct
  source 1..10: mol_type = other RNA
  misc_feature 1..10: note = Description of sequence: Splice site sequence
caggtagtga

SEQ ID NO: 1229 - RNA, 10 nt, synthetic construct
  source 1..10: mol_type = other RNA
  misc_feature 1..10: note = Description of sequence: Splice site sequence
caggtagtgt

SEQ ID NO: 1230 - RNA, 10 nt, synthetic construct
  source 1..10: mol_type = other RNA
  misc_feature 1..10: note = Description of sequence: Splice site sequence
caggtagttc

SEQ ID NO: 1231 - RNA, 10 nt, synthetic construct
  source 1..10: mol_type = other RNA
  misc_feature 1..10: note = Description of sequence: Splice site sequence
caggtagttg

SEQ ID NO: 1232 - RNA, 10 nt, synthetic construct
  source 1..10: mol_type = other RNA
  misc_feature 1..10: note = Description of sequence: Splice site sequence
caggtagttt

SEQ ID NO: 1233 - RNA, 10 nt, synthetic construct
  source 1..10: mol_type = other RNA
  misc_feature 1..10: note = Description of sequence: Splice site sequence
caggtataag

SEQ ID NO: 1234 - RNA, 10 nt, synthetic construct
  source 1..10: mol_type = other RNA
  misc_feature 1..10: note = Description of sequence: Splice site sequence
caggtataca

SEQ ID NO: 1235 - RNA, 10 nt, synthetic construct
  source 1..10: mol_type = other RNA
  misc_feature 1..10: note = Description of sequence: Splice site sequence
caggtataga

SEQ ID NO: 1236 - RNA, 10 nt, synthetic construct
  source 1..10: mol_type = other RNA
  misc_feature 1..10: note = Description of sequence: Splice site sequence
caggtatatc

SEQ ID NO: 1237 - RNA, 10 nt, synthetic construct
  source 1..10: mol_type = other RNA
  misc_feature 1..10: note = Description of sequence: Splice site sequence
caggtatatg

SEQ ID NO: 1238 - RNA, 10 nt, synthetic construct
  source 1..10: mol_type = other RNA
  misc_feature 1..10: note = Description of sequence: Splice site sequence
caggtatatt

SEQ ID NO: 1239 - RNA, 10 nt, synthetic construct
  source 1..10: mol_type = other RNA
  misc_feature 1..10: note = Description of sequence: Splice site sequence
caggtatcag

SEQ ID NO: 1240 - RNA, 10 nt, synthetic construct
  source 1..10: mol_type = other RNA
  misc_feature 1..10: note = Description of sequence: Splice site sequence
caggtatcat

SEQ ID NO: 1241 - RNA, 10 nt, synthetic construct
  source 1..10: mol_type = other RNA
  misc_feature 1..10: note = Description of sequence: Splice site sequence
caggtatcct

SEQ ID NO: 1242 - RNA, 10 nt, synthetic construct
  source 1..10: mol_type = other RNA
  misc_feature 1..10: note = Description of sequence: Splice site sequence
caggtatcga

SEQ ID NO: 1243 - RNA, 10 nt, synthetic construct
  source 1..10: mol_type = other RNA
  misc_feature 1..10: note = Description of sequence: Splice site sequence
caggtatcgc

SEQ ID NO: 1244 - RNA, 10 nt, synthetic construct
  source 1..10: mol_type = other RNA
  misc_feature 1..10: note = Description of sequence: Splice site sequence
caggtatcta

SEQ ID NO: 1245 - RNA, 10 nt, synthetic construct
  source 1..10: mol_type = other RNA
  misc_feature 1..10: note = Description of sequence: Splice site sequence
caggtatctg

SEQ ID NO: 1246 - RNA, 10 nt, synthetic construct
  source 1..10: mol_type = other RNA
  misc_feature 1..10: note = Description of sequence: Splice site sequence
caggtatctt

SEQ ID NO: 1247 - RNA, 10 nt, synthetic construct
  source 1..10: mol_type = other RNA
  misc_feature 1..10: note = Description of sequence: Splice site sequence
caggtatgaa

SEQ ID NO: 1248 - RNA, 10 nt, synthetic construct
  source 1..10: mol_type = other RNA
  misc_feature 1..10: note = Description of sequence: Splice site sequence
caggtatgac

SEQ ID NO: 1249 - RNA, 10 nt, synthetic construct
  source 1..10: mol_type = other RNA
  misc_feature 1..10: note = Description of sequence: Splice site sequence
caggtatgag

SEQ ID NO: 1250 - RNA, 10 nt, synthetic construct
  source 1..10: mol_type = other RNA
  misc_feature 1..10: note = Description of sequence: Splice site sequence
caggtatgat

SEQ ID NO: 1251 - RNA, 10 nt, synthetic construct
  source 1..10: mol_type = other RNA
  misc_feature 1..10: note = Description of sequence: Splice site sequence
caggtatgca

SEQ ID NO: 1252 - RNA, 10 nt, synthetic construct
  source 1..10: mol_type = other RNA
  misc_feature 1..10: note = Description of sequence: Splice site sequence
caggtatgcc

SEQ ID NO: 1253 - RNA, 10 nt, synthetic construct
  source 1..10: mol_type = other RNA
  misc_feature 1..10: note = Description of sequence: Splice site sequence
caggtatgcg

SEQ ID NO: 1254 - RNA, 10 nt, synthetic construct
  source 1..10: mol_type = other RNA
  misc_feature 1..10: note = Description of sequence: Splice site sequence
caggtatgct

SEQ ID NO: 1255 - RNA, 10 nt, synthetic construct
  source 1..10: mol_type = other RNA
  misc_feature 1..10: note = Description of sequence: Splice site sequence
caggtatgga

SEQ ID NO: 1256 - RNA, 10 nt, synthetic construct
  source 1..10: mol_type = other RNA
  misc_feature 1..10: note = Description of sequence: Splice site sequence
caggtatggg

SEQ ID NO: 1257 - RNA, 10 nt, synthetic construct
  source 1..10: mol_type = other RNA
  misc_feature 1..10: note = Description of sequence: Splice site sequence
caggtatggt

SEQ ID NO: 1258 - RNA, 10 nt, synthetic construct
  source 1..10: mol_type = other RNA
  misc_feature 1..10: note = Description of sequence: Splice site sequence
caggtatgta

SEQ ID NO: 1259 - RNA, 10 nt, synthetic construct
  source 1..10: mol_type = other RNA
  misc_feature 1..10: note = Description of sequence: Splice site sequence
caggtatgtc

SEQ ID NO: 1260 - RNA, 10 nt, synthetic construct
  source 1..10: mol_type = other RNA
  misc_feature 1..10: note = Description of sequence: Splice site sequence
caggtatgtg

SEQ ID NO: 1261 - RNA, 10 nt, synthetic construct
  source 1..10: mol_type = other RNA
  misc_feature 1..10: note = Description of sequence: Splice site sequence
caggtatgtt

SEQ ID NO: 1262 - RNA, 10 nt, synthetic construct
  source 1..10: mol_type = other RNA
  misc_feature 1..10: note = Description of sequence: Splice site sequence
caggtattat

SEQ ID NO: 1263 - RNA, 10 nt, synthetic construct
  source 1..10: mol_type = other RNA
  misc_feature 1..10: note = Description of sequence: Splice site sequence
caggtattca

SEQ ID NO: 1264 - RNA, 10 nt, synthetic construct
  source 1..10: mol_type = other RNA
  misc_feature 1..10: note = Description of sequence: Splice site sequence
caggtattct

SEQ ID NO: 1265 - RNA, 10 nt, synthetic construct
  source 1..10: mol_type = other RNA
  misc_feature 1..10: note = Description of sequence: Splice site sequence
caggtattga

SEQ ID NO: 1266 - RNA, 10 nt, synthetic construct
  source 1..10: mol_type = other RNA
  misc_feature 1..10: note = Description of sequence: Splice site sequence
caggtattgg

SEQ ID NO: 1267 - RNA, 10 nt, synthetic construct
  source 1..10: mol_type = other RNA
  misc_feature 1..10: note = Description of sequence: Splice site sequence
caggtattgt

SEQ ID NO: 1268 - RNA, 10 nt, synthetic construct
  source 1..10: mol_type = other RNA
  misc_feature 1..10: note = Description of sequence: Splice site sequence
caggtattta

SEQ ID NO: 1269 - RNA, 10 nt, synthetic construct
  source 1..10: mol_type = other RNA
  misc_feature 1..10: note = Description of sequence: Splice site sequence
caggtatttc

SEQ ID NO: 1270 - RNA, 10 nt, synthetic construct
  source 1..10: mol_type = other RNA
  misc_feature 1..10: note = Description of sequence: Splice site sequence
caggtatttg

SEQ ID NO: 1271 - RNA, 10 nt, synthetic construct
  source 1..10: mol_type = other RNA
  misc_feature 1..10: note = Description of sequence: Splice site sequence
caggtatttt

SEQ ID NO: 1272 - RNA, 10 nt, synthetic construct
  source 1..10: mol_type = other RNA
  misc_feature 1..10: note = Description of sequence: Splice site sequence
caggtcaaca

SEQ ID NO: 1273 - RNA, 10 nt, synthetic construct
  source 1..10: mol_type = other RNA
  misc_feature 1..10: note = Description of sequence: Splice site sequence
caggtcaatg

SEQ ID NO: 1274 - RNA, 10 nt, synthetic construct
  source 1..10: mol_type = other RNA
  misc_feature 1..10: note = Description of sequence: Splice site sequence
caggtcacgt

SEQ ID NO: 1275 - RNA, 10 nt, synthetic construct
  source 1..10: mol_type = other RNA
  misc_feature 1..10: note = Description of sequence: Splice site sequence
caggtcagaa

SEQ ID NO: 1276 - RNA, 10 nt, synthetic construct
  source 1..10: mol_type = other RNA
  misc_feature 1..10: note = Description of sequence: Splice site sequence
caggtcagac

SEQ ID NO: 1277 - RNA, 10 nt, synthetic construct
  source 1..10: mol_type = other RNA
  misc_feature 1..10: note = Description of sequence: Splice site sequence
caggtcagca

SEQ ID NO: 1278 - RNA, 10 nt, synthetic construct
  source 1..10: mol_type = other RNA
  misc_feature 1..10: note = Description of sequence: Splice site sequence
caggtcagcc

SEQ ID NO: 1279 - RNA, 10 nt, synthetic construct
  source 1..10: mol_type = other RNA
  misc_feature 1..10: note = Description of sequence: Splice site sequence
caggtcagcg

SEQ ID NO: 1280 - RNA, 10 nt, synthetic construct
  source 1..10: mol_type = other RNA
  misc_feature 1..10: note = Description of sequence: Splice site sequence
caggtcagga

SEQ ID NO: 1281 - RNA, 10 nt, synthetic construct
  source 1..10: mol_type = other RNA
  misc_feature 1..10: note = Description of sequence: Splice site sequence
caggtcagta

SEQ ID NO: 1282 - RNA, 10 nt, synthetic construct
  source 1..10: mol_type = other RNA
  misc_feature 1..10: note = Description of sequence: Splice site sequence
caggtcagtc

SEQ ID NO: 1283 - RNA, 10 nt, synthetic construct
  source 1..10: mol_type = other RNA
  misc_feature 1..10: note = Description of sequence: Splice site sequence
caggtcagtg

SEQ ID NO: 1284 - RNA, 10 nt, synthetic construct
  source 1..10: mol_type = other RNA
  misc_feature 1..10: note = Description of sequence: Splice site sequence
caggtcagtt

SEQ ID NO: 1285 - RNA, 10 nt, synthetic construct
  source 1..10: mol_type = other RNA
  misc_feature 1..10: note = Description of sequence: Splice site sequence
caggtcatcc

SEQ ID NO: 1286 - RNA, 10 nt, synthetic construct
  source 1..10: mol_type = other RNA
  misc_feature 1..10: note = Description of sequence: Splice site sequence
caggtcatgc

SEQ ID NO: 1287 - RNA, 10 nt, synthetic construct
  source 1..10: mol_type = other RNA
  misc_feature 1..10: note = Description of sequence: Splice site sequence
caggtcatta

SEQ ID NO: 1288 - RNA, 10 nt, synthetic construct
  source 1..10: mol_type = other RNA
  misc_feature 1..10: note = Description of sequence: Splice site sequence
caggtcattt

SEQ ID NO: 1289 - RNA, 10 nt, synthetic construct
  source 1..10: mol_type = other RNA
  misc_feature 1..10: note = Description of sequence: Splice site sequence
caggtccacc

SEQ ID NO: 1290 - RNA, 10 nt, synthetic construct
  source 1..10: mol_type = other RNA
  misc_feature 1..10: note = Description of sequence: Splice site sequence
caggtccact

SEQ ID NO: 1291 - RNA, 10 nt, synthetic construct
  source 1..10: mol_type = other RNA
  misc_feature 1..10: note = Description of sequence: Splice site sequence
caggtccagt

SEQ ID NO: 1292 - RNA, 10 nt, synthetic construct
  source 1..10: mol_type = other RNA
  misc_feature 1..10: note = Description of sequence: Splice site sequence
caggtccatc

SEQ ID NO: 1293 - RNA, 10 nt, synthetic construct
  source 1..10: mol_type = other RNA
  misc_feature 1..10: note = Description of sequence: Splice site sequence
caggtccatt

SEQ ID NO: 1294 - RNA, 10 nt, synthetic construct
  source 1..10: mol_type = other RNA
  misc_feature 1..10: note = Description of sequence: Splice site sequence
caggtcccag

SEQ ID NO: 1295 - RNA, 10 nt, synthetic construct
  source 1..10: mol_type = other RNA
  misc_feature 1..10: note = Description of sequence: Splice site sequence
caggtccctg

SEQ ID NO: 1296 - RNA, 10 nt, synthetic construct
  source 1..10: mol_type = other RNA
  misc_feature 1..10: note = Description of sequence: Splice site sequence
caggtcctga

SEQ ID NO: 1297 - RNA, 10 nt, synthetic construct
  source 1..10: mol_type = other RNA
  misc_feature 1..10: note = Description of sequence: Splice site sequence
caggtcctgc

SEQ ID NO: 1298 - RNA, 10 nt, synthetic construct
  source 1..10: mol_type = other RNA
  misc_feature 1..10: note = Description of sequence: Splice site sequence
caggtcctgg

SEQ ID NO: 1299 - RNA, 10 nt, synthetic construct
  source 1..10: mol_type = other RNA
  misc_feature 1..10: note = Description of sequence: Splice site sequence
caggtcggcc

SEQ ID NO: 1300 - RNA, 10 nt, synthetic construct
  source 1..10: mol_type = other RNA
  misc_feature 1..10: note = Description of sequence: Splice site sequence
caggtcggtg

SEQ ID NO: 1301 - RNA, 10 nt, synthetic construct
  source 1..10: mol_type = other RNA
  misc_feature 1..10: note = Description of sequence: Splice site sequence
caggtcgttg

SEQ ID NO: 1302 - RNA, 10 nt, synthetic construct
  source 1..10: mol_type = other RNA
  misc_feature 1..10: note = Description of sequence: Splice site sequence
caggtctctc

SEQ ID NO: 1303 - RNA, 10 nt, synthetic construct
  source 1..10: mol_type = other RNA
  misc_feature 1..10: note = Description of sequence: Splice site sequence
caggtctctt

SEQ ID NO: 1304 - RNA, 10 nt, synthetic construct
  source 1..10: mol_type = other RNA
  misc_feature 1..10: note = Description of sequence: Splice site sequence
caggtctgag

SEQ ID NO: 1305 - RNA, 10 nt, synthetic construct
  source 1..10: mol_type = other RNA
  misc_feature 1..10: note = Description of sequence: Splice site sequence
caggtctgcc

SEQ ID NO: 1306 - RNA, 10 nt, synthetic construct
  source 1..10: mol_type = other RNA
  misc_feature 1..10: note = Description of sequence: Splice site sequence
caggtctgcg

SEQ ID NO: 1307 - RNA, 10 nt, synthetic construct
  source 1..10: mol_type = other RNA
  misc_feature 1..10: note = Description of sequence: Splice site sequence
caggtctgga

SEQ ID NO: 1308 - RNA, 10 nt, synthetic construct
  source 1..10: mol_type = other RNA
  misc_feature 1..10: note = Description of sequence: Splice site sequence
caggtctggt

SEQ ID NO: 1309 - RNA, 10 nt, synthetic construct
  source 1..10: mol_type = other RNA
  misc_feature 1..10: note = Description of sequence: Splice site sequence
caggtctgta

SEQ ID NO: 1310 - RNA, 10 nt, synthetic construct
  source 1..10: mol_type = other RNA
  misc_feature 1..10: note = Description of sequence: Splice site sequence
caggtctgtc

SEQ ID NO: 1311 - RNA, 10 nt, synthetic construct
  source 1..10: mol_type = other RNA
  misc_feature 1..10: note = Description of sequence: Splice site sequence
caggtctgtg

SEQ ID NO: 1312 - RNA, 10 nt, synthetic construct
  source 1..10: mol_type = other RNA
  misc_feature 1..10: note = Description of sequence: Splice site sequence
caggtctgtt

SEQ ID NO: 1313 - RNA, 10 nt, synthetic construct
  source 1..10: mol_type = other RNA
  misc_feature 1..10: note = Description of sequence: Splice site sequence
caggtcttcc

SEQ ID NO: 1314 - RNA, 10 nt, synthetic construct
  source 1..10: mol_type = other RNA
  misc_feature 1..10: note = Description of sequence: Splice site sequence
caggtctttc

SEQ ID NO: 1315 - RNA, 10 nt, synthetic construct
  source 1..10: mol_type = other RNA
  misc_feature 1..10: note = Description of sequence: Splice site sequence
caggtgaaag

SEQ ID NO: 1316 - RNA, 10 nt, synthetic construct
  source 1..10: mol_type = other RNA
  misc_feature 1..10: note = Description of sequence: Splice site sequence
caggtgaaat

SEQ ID NO: 1317 - RNA, 10 nt, synthetic construct
  source 1..10: mol_type = other RNA
  misc_feature 1..10: note = Description of sequence: Splice site sequence
caggtgaaca

SEQ ID NO: 1318 - RNA, 10 nt, synthetic construct
  source 1..10: mol_type = other RNA
  misc_feature 1..10: note = Description of sequence: Splice site sequence
caggtgaaga

SEQ ID NO: 1319 - RNA, 10 nt, synthetic construct
  source 1..10: mol_type = other RNA
  misc_feature 1..10: note = Description of sequence: Splice site sequence
caggtgaagg

SEQ ID NO: 1320 - RNA, 10 nt, synthetic construct
  source 1..10: mol_type = other RNA
  misc_feature 1..10: note = Description of sequence: Splice site sequence
caggtgaata

SEQ ID NO: 1321 - RNA, 10 nt, synthetic construct
  source 1..10: mol_type = other RNA
  misc_feature 1..10: note = Description of sequence: Splice site sequence
caggtgaatc

SEQ ID NO: 1322 - RNA, 10 nt, synthetic construct
  source 1..10: mol_type = other RNA
  misc_feature 1..10: note = Description of sequence: Splice site sequence
caggtgaatt

SEQ ID NO: 1323 - RNA, 10 nt, synthetic construct
  source 1..10: mol_type = other RNA
  misc_feature 1..10: note = Description of sequence: Splice site sequence
caggtgacaa

SEQ ID NO: 1324 - RNA, 10 nt, synthetic construct
  source 1..10: mol_type = other RNA
  misc_feature 1..10: note = Description of sequence: Splice site sequence
caggtgacat

SEQ ID NO: 1325 - RNA, 10 nt, synthetic construct
  source 1..10: mol_type = other RNA
  misc_feature 1..10: note = Description of sequence: Splice site sequence
caggtgacca

SEQ ID NO: 1326 - RNA, 10 nt, synthetic construct
  source 1..10: mol_type = other RNA
  misc_feature 1..10: note = Description of sequence: Splice site sequence
caggtgaccc

SEQ ID NO: 1327 - RNA, 10 nt, synthetic construct
  source 1..10: mol_type = other RNA
  misc_feature 1..10: note = Description of sequence: Splice site sequence
caggtgaccg

SEQ ID NO: 1328 - RNA, 10 nt, synthetic construct
  source 1..10: mol_type = other RNA
  misc_feature 1..10: note = Description of sequence: Splice site sequence
caggtgacct

SEQ ID NO: 1329 - RNA, 10 nt, synthetic construct
  source 1..10: mol_type = other RNA
  misc_feature 1..10: note = Description of sequence: Splice site sequence
caggtgacgg

SEQ ID NO: 1330 - RNA, 10 nt, synthetic construct
  source 1..10: mol_type = other RNA
  misc_feature 1..10: note = Description of sequence: Splice site sequence
caggtgacta

SEQ ID NO: 1331 - RNA, 10 nt, synthetic construct
  source 1..10: mol_type = other RNA
  misc_feature 1..10: note = Description of sequence: Splice site sequence
caggtgactc

SEQ ID NO: 1332 - RNA, 10 nt, synthetic construct
  source 1..10: mol_type = other RNA
  misc_feature 1..10: note = Description of sequence: Splice site sequence
caggtgactg

SEQ ID NO: 1333 - RNA, 10 nt, synthetic construct
  source 1..10: mol_type = other RNA
  misc_feature 1..10: note = Description of sequence: Splice site sequence
caggtgagaa

SEQ ID NO: 1334 - RNA, 10 nt, synthetic construct
  source 1..10: mol_type = other RNA
  misc_feature 1..10: note = Description of sequence: Splice site sequence
caggtgagac

SEQ ID NO: 1335 - RNA, 10 nt, synthetic construct
  source 1..10: mol_type = other RNA
  misc_feature 1..10: note = Description of sequence: Splice site sequence
caggtgagag

SEQ ID NO: 1336 - RNA, 10 nt, synthetic construct
  source 1..10: mol_type = other RNA
  misc_feature 1..10: note = Description of sequence: Splice site sequence
caggtgagat

SEQ ID NO: 1337 - RNA, 10 nt, synthetic construct
  source 1..10: mol_type = other RNA
  misc_feature 1..10: note = Description of sequence: Splice site sequence
caggtgagca

SEQ ID NO: 1338 - RNA, 10 nt, synthetic construct
  source 1..10: mol_type = other RNA
  misc_feature 1..10: note = Description of sequence: Splice site sequence
caggtgagcc

SEQ ID NO: 1339 - RNA, 10 nt, synthetic construct
  source 1..10: mol_type = other RNA
  misc_feature 1..10: note = Description of sequence: Splice site sequence
caggtgagcg

SEQ ID NO: 1340 - RNA, 10 nt, synthetic construct
  source 1..10: mol_type = other RNA
  misc_feature 1..10: note = Description of sequence: Splice site sequence
caggtgagct

SEQ ID NO: 1341 - RNA, 10 nt, synthetic construct
  source 1..10: mol_type = other RNA
  misc_feature 1..10: note = Description of sequence: Splice site sequence
caggtgagga

SEQ ID NO: 1342 - RNA, 10 nt, synthetic construct
  source 1..10: mol_type = other RNA
  misc_feature 1..10: note = Description of sequence: Splice site sequence
caggtgaggc

SEQ ID NO: 1343 - RNA, 10 nt, synthetic construct
  source 1..10: mol_type = other RNA
  misc_feature 1..10: note = Description of sequence: Splice site sequence
caggtgaggg

SEQ ID NO: 1344 - RNA, 10 nt, synthetic construct
  source 1..10: mol_type = other RNA
  misc_feature 1..10: note = Description of sequence: Splice site sequence
caggtgaggt

SEQ ID NO: 1345 - RNA, 10 nt, synthetic construct
  source 1..10: mol_type = other RNA
  misc_feature 1..10: note = Description of sequence: Splice site sequence
caggtgagta

SEQ ID NO: 1346 - RNA, 10 nt, synthetic construct
  source 1..10: mol_type = other RNA
  misc_feature 1..10: note = Description of sequence: Splice site sequence
caggtgagtc

SEQ ID NO: 1347 - RNA, 10 nt, synthetic construct
  source 1..10: mol_type = other RNA
  misc_feature 1..10: note = Description of sequence: Splice site sequence
caggtgagtg

SEQ ID NO: 1348 - RNA, 10 nt, synthetic construct
  source 1..10: mol_type = other RNA
  misc_feature 1..10: note = Description of sequence: Splice site sequence
caggtgagtt

SEQ ID NO: 1349 - RNA, 10 nt, synthetic construct
  source 1..10: mol_type = other RNA
  misc_feature 1..10: note = Description of sequence: Splice site sequence
caggtgataa

SEQ ID NO: 1350 - RNA, 10 nt, synthetic construct
  source 1..10: mol_type = other RNA
  misc_feature 1..10: note = Description of sequence: Splice site sequence
caggtgatcc

SEQ ID NO: 1351 - RNA, 10 nt, synthetic construct
  source 1..10: mol_type = other RNA
  misc_feature 1..10: note = Description of sequence: Splice site sequence
caggtgatct

SEQ ID NO: 1352 - RNA, 10 nt, synthetic construct
  source 1..10: mol_type = other RNA
  misc_feature 1..10: note = Description of sequence: Splice site sequence
caggtgatgc

SEQ ID NO: 1353 - RNA, 10 nt, synthetic construct
  source 1..10: mol_type = other RNA
  misc_feature 1..10: note = Description of sequence: Splice site sequence
caggtgatgg

SEQ ID NO: 1354 - RNA, 10 nt, synthetic construct
  source 1..10: mol_type = other RNA
  misc_feature 1..10: note = Description of sequence: Splice site sequence
caggtgatgt

SEQ ID NO: 1355 - RNA, 10 nt, synthetic construct
  source 1..10: mol_type = other RNA
  misc_feature 1..10: note = Description of sequence: Splice site sequence
caggtgatta

SEQ ID NO: 1356 - RNA, 10 nt, synthetic construct
  source 1..10: mol_type = other RNA
  misc_feature 1..10: note = Description of sequence: Splice site sequence
caggtgattc

SEQ ID NO: 1357 - RNA, 10 nt, synthetic construct
  source 1..10: mol_type = other RNA
  misc_feature 1..10: note = Description of sequence: Splice site sequence
caggtgattg

SEQ ID NO: 1358 - RNA, 10 nt, synthetic construct
  source 1..10: mol_type = other RNA
  misc_feature 1..10: note = Description of sequence: Splice site sequence
caggtgattt

SEQ ID NO: 1359 - RNA, 10 nt, synthetic construct
  source 1..10: mol_type = other RNA
  misc_feature 1..10: note = Description of sequence: Splice site sequence
caggtgcaaa

SEQ ID NO: 1360 - RNA, 10 nt, synthetic construct
  source 1..10: mol_type = other RNA
  misc_feature 1..10: note = Description of sequence: Splice site sequence
caggtgcaag

SEQ ID NO: 1361 - RNA, 10 nt, synthetic construct
  source 1..10: mol_type = other RNA
  misc_feature 1..10: note = Description of sequence: Splice site sequence
caggtgcaca

SEQ ID NO: 1362 - RNA, 10 nt, synthetic construct
  source 1..10: mol_type = other RNA
  misc_feature 1..10: note = Description of sequence: Splice site sequence
caggtgcacg

SEQ ID NO: 1363 - RNA, 10 nt, synthetic construct
  source 1..10: mol_type = other RNA
  misc_feature 1..10: note = Description of sequence: Splice site sequence
caggtgcaga

SEQ ID NO: 1364 - RNA, 10 nt, synthetic construct
  source 1..10: mol_type = other RNA
  misc_feature 1..10: note = Description of sequence: Splice site sequence
caggtgcagg

SEQ ID NO: 1365 - RNA, 10 nt, synthetic construct
  source 1..10: mol_type = other RNA
  misc_feature 1..10: note = Description of sequence: Splice site sequence
caggtgcata

SEQ ID NO: 1366 - RNA, 10 nt, synthetic construct
  source 1..10: mol_type = other RNA
  misc_feature 1..10: note = Description of sequence: Splice site sequence
caggtgcatc

SEQ ID NO: 1367 - RNA, 10 nt, synthetic construct
  source 1..10: mol_type = other RNA
  misc_feature 1..10: note = Description of sequence: Splice site sequence
caggtgcatg

SEQ ID NO: 1368 - RNA, 10 nt, synthetic construct
  source 1..10: mol_type = other RNA
  misc_feature 1..10: note = Description of sequence: Splice site sequence
caggtgccaa

SEQ ID NO: 1369 - RNA, 10 nt, synthetic construct
  source 1..10: mol_type = other RNA
  misc_feature 1..10: note = Description of sequence: Splice site sequence
caggtgccca

SEQ ID NO: 1370 - RNA, 10 nt, synthetic construct
  source 1..10: mol_type = other RNA
  misc_feature 1..10: note = Description of sequence: Splice site sequence
caggtgcccc

SEQ ID NO: 1371 - RNA, 10 nt, synthetic construct
  source 1..10: mol_type = other RNA
  misc_feature 1..10: note = Description of sequence: Splice site sequence
caggtgcccg

SEQ ID NO: 1372 - RNA, 10 nt, synthetic construct
  source 1..10: mol_type = other RNA
  misc_feature 1..10: note = Description of sequence: Splice site sequence
caggtgccta

SEQ ID NO: 1373 - RNA, 10 nt, synthetic construct
  source 1..10: mol_type = other RNA
  misc_feature 1..10: note = Description of sequence: Splice site sequence
caggtgcctg

SEQ ID NO: 1374 - RNA, 10 nt, synthetic construct
  source 1..10: mol_type = other RNA
  misc_feature 1..10: note = Description of sequence: Splice site sequence
caggtgcgaa

SEQ ID NO: 1375 - RNA, 10 nt, synthetic construct
  source 1..10: mol_type = other RNA
  misc_feature 1..10: note = Description of sequence: Splice site sequence
caggtgcgca

SEQ ID NO: 1376 - RNA, 10 nt, synthetic construct
  source 1..10: mol_type = other RNA
  misc_feature 1..10: note = Description of sequence: Splice site sequence
caggtgcgcc

SEQ ID NO: 1377 - RNA, 10 nt, synthetic construct
  source 1..10: mol_type = other RNA
  misc_feature 1..10: note = Description of sequence: Splice site sequence
caggtgcgcg

SEQ ID NO: 1378 - RNA, 10 nt, synthetic construct
  source 1..10: mol_type = other RNA
  misc_feature 1..10: note = Description of sequence: Splice site sequence
caggtgcgga

SEQ ID NO: 1379 - RNA, 10 nt, synthetic construct
  source 1..10: mol_type = other RNA
  misc_feature 1..10: note = Description of sequence: Splice site sequence
caggtgcggt

SEQ ID NO: 1380 - RNA, 10 nt, synthetic construct
  source 1..10: mol_type = other RNA
  misc_feature 1..10: note = Description of sequence: Splice site sequence
caggtgcgta

SEQ ID NO: 1381 - RNA, 10 nt, synthetic construct
  source 1..10: mol_type = other RNA
  misc_feature 1..10: note = Description of sequence: Splice site sequence
caggtgcgtc

SEQ ID NO: 1382 - RNA, 10 nt, synthetic construct
  source 1..10: mol_type = other RNA
  misc_feature 1..10: note = Description of sequence: Splice site sequence
caggtgcgtg

SEQ ID NO: 1383 - RNA, 10 nt, synthetic construct
  source 1..10: mol_type = other RNA
  misc_feature 1..10: note = Description of sequence: Splice site sequence
caggtgctag

SEQ ID NO: 1384 - RNA, 10 nt, synthetic construct
  source 1..10: mol_type = other RNA
  misc_feature 1..10: note = Description of sequence: Splice site sequence
caggtgctat

SEQ ID NO: 1385 - RNA, 10 nt, synthetic construct
  source 1..10: mol_type = other RNA
  misc_feature 1..10: note = Description of sequence: Splice site sequence
caggtgctca

SEQ ID NO: 1386 - RNA, 10 nt, synthetic construct
  source 1..10: mol_type = other RNA
  misc_feature 1..10: note = Description of sequence: Splice site sequence
caggtgctcc

SEQ ID NO: 1387 - RNA, 10 nt, synthetic construct
  source 1..10: mol_type = other RNA
  misc_feature 1..10: note = Description of sequence: Splice site sequence
caggtgctcg

SEQ ID NO: 1388 - RNA, 10 nt, synthetic construct
  source 1..10: mol_type = other RNA
  misc_feature 1..10: note = Description of sequence: Splice site sequence
caggtgctgc

SEQ ID NO: 1389 - RNA, 10 nt, synthetic construct
  source 1..10: mol_type = other RNA
  misc_feature 1..10: note = Description of sequence: Splice site sequence
caggtgctgg

SEQ ID NO: 1390 - RNA, 10 nt, synthetic construct
  source 1..10: mol_type = other RNA
  misc_feature 1..10: note = Description of sequence: Splice site sequence
caggtgctta

SEQ ID NO: 1391 - RNA, 10 nt, synthetic construct
  source 1..10: mol_type = other RNA
  misc_feature 1..10: note = Description of sequence: Splice site sequence
caggtgcttc

SEQ ID NO: 1392 - RNA, 10 nt, synthetic construct
  source 1..10: mol_type = other RNA
  misc_feature 1..10: note = Description of sequence: Splice site sequence
caggtgcttg

SEQ ID NO: 1393 - RNA, 10 nt, synthetic construct
  source 1..10: mol_type = other RNA
  misc_feature 1..10: note = Description of sequence: Splice site sequence
caggtggaac

SEQ ID NO: 1394 - RNA, 10 nt, synthetic construct
  source 1..10: mol_type = other RNA
  misc_feature 1..10: note = Description of sequence: Splice site sequence
caggtggaag

SEQ ID NO: 1395 - RNA, 10 nt, synthetic construct
  source 1..10: mol_type = other RNA
  misc_feature 1..10: note = Description of sequence: Splice site sequence
caggtggaat

SEQ ID NO: 1396 - RNA, 10 nt, synthetic construct
  source 1..10: mol_type = other RNA
  misc_feature 1..10: note = Description of sequence: Splice site sequence
caggtggaga

SEQ ID NO: 1397 - RNA, 10 nt, synthetic construct
  source 1..10: mol_type = other RNA
  misc_feature 1..10: note = Description of sequence: Splice site sequence
caggtggagt

SEQ ID NO: 1398 - RNA, 10 nt, synthetic construct
  source 1..10: mol_type = other RNA
  misc_feature 1..10: note = Description of sequence: Splice site sequence
caggtggatt

SEQ ID NO: 1399 - RNA, 10 nt, synthetic construct
  source 1..10: mol_type = other RNA
  misc_feature 1..10: note = Description of sequence: Splice site sequence
caggtggcca

SEQ ID NO: 1400 - RNA, 10 nt, synthetic construct
  source 1..10: mol_type = other RNA
  misc_feature 1..10: note = Description of sequence: Splice site sequence
caggtggctc

SEQ ID NO: 1401 - RNA, 10 nt, synthetic construct
  source 1..10: mol_type = other RNA
  misc_feature 1..10: note = Description of sequence: Splice site sequence
caggtggctg

SEQ ID NO: 1402 - RNA, 10 nt, synthetic construct
  source 1..10: mol_type = other RNA
  misc_feature 1..10: note = Description of sequence: Splice site sequence
caggtgggaa

SEQ ID NO: 1403 - RNA, 10 nt, synthetic construct
  source 1..10: mol_type = other RNA
  misc_feature 1..10: note = Description of sequence: Splice site sequence
caggtgggac

SEQ ID NO: 1404 - RNA, 10 nt, synthetic construct
  source 1..10: mol_type = other RNA
  misc_feature 1..10: note = Description of sequence: Splice site sequence
caggtgggag

SEQ ID NO: 1405 - RNA, 10 nt, synthetic construct
  source 1..10: mol_type = other RNA
  misc_feature 1..10: note = Description of sequence: Splice site sequence
caggtgggat

SEQ ID NO: 1406 - RNA, 10 nt, synthetic construct
  source 1..10: mol_type = other RNA
  misc_feature 1..10: note = Description of sequence: Splice site sequence
caggtgggca

SEQ ID NO: 1407 - RNA, 10 nt, synthetic construct
  source 1..10: mol_type = other RNA
  misc_feature 1..10: note = Description of sequence: Splice site sequence
caggtgggcc

SEQ ID NO: 1408 - RNA, 10 nt, synthetic construct
  source 1..10: mol_type = other RNA
  misc_feature 1..10: note = Description of sequence: Splice site sequence
caggtgggct

SEQ ID NO: 1409 - RNA, 10 nt, synthetic construct
  source 1..10: mol_type = other RNA
  misc_feature 1..10: note = Description of sequence: Splice site sequence
caggtgggga

SEQ ID NO: 1410 - RNA, 10 nt, synthetic construct
  source 1..10: mol_type = other RNA
  misc_feature 1..10: note = Description of sequence: Splice site sequence
caggtggggc

SEQ ID NO: 1411 - RNA, 10 nt, synthetic construct
  source 1..10: mol_type = other RNA
  misc_feature 1..10: note = Description of sequence: Splice site sequence
caggtggggg

SEQ ID NO: 1412 - RNA, 10 nt, synthetic construct
  source 1..10: mol_type = other RNA
  misc_feature 1..10: note = Description of sequence: Splice site sequence
caggtggggt

SEQ ID NO: 1413 - RNA, 10 nt, synthetic construct
  source 1..10: mol_type = other RNA
  misc_feature 1..10: note = Description of sequence: Splice site sequence
caggtgggta

SEQ ID NO: 1414 - RNA, 10 nt, synthetic construct
  source 1..10: mol_type = other RNA
  misc_feature 1..10: note = Description of sequence: Splice site sequence
caggtgggtc

SEQ ID NO: 1415 - RNA, 10 nt, synthetic construct
  source 1..10: mol_type = other RNA
  misc_feature 1..10: note = Description of sequence: Splice site sequence
caggtgggtg

SEQ ID NO: 1416 - RNA, 10 nt, synthetic construct
  source 1..10: mol_type = other RNA
  misc_feature 1..10: note = Description of sequence: Splice site sequence
caggtgggtt

SEQ ID NO: 1417 - RNA, 10 nt, synthetic construct
  source 1..10: mol_type = other RNA
  misc_feature 1..10: note = Description of sequence: Splice site sequence
caggtggtct

SEQ ID NO: 1418 - RNA, 10 nt, synthetic construct
  source 1..10: mol_type = other RNA
  misc_feature 1..10: note = Description of sequence: Splice site sequence
caggtggtgg

SEQ ID NO: 1419 - RNA, 10 nt, synthetic construct
  source 1..10: mol_type = other RNA
  misc_feature 1..10: note = Description of sequence: Splice site sequence
caggtggttg

SEQ ID NO: 1420 - RNA, 10 nt, synthetic construct
  source 1..10: mol_type = other RNA
  misc_feature 1..10: note = Description of sequence: Splice site sequence
caggtgtaca

SEQ ID NO: 1421 - RNA, 10 nt, synthetic construct
  source 1..10: mol_type = other RNA
  misc_feature 1..10: note = Description of sequence: Splice site sequence
caggtgtagg

SEQ ID NO: 1422 - RNA, 10 nt, synthetic construct
  source 1..10: mol_type = other RNA
  misc_feature 1..10: note = Description of sequence: Splice site sequence
caggtgtatc

SEQ ID NO: 1423 - RNA, 10 nt, synthetic construct
  source 1..10: mol_type = other RNA
  misc_feature 1..10: note = Description of sequence: Splice site sequence
caggtgtcac

SEQ ID NO: 1424 - RNA, 10 nt, synthetic construct
  source 1..10: mol_type = other RNA
  misc_feature 1..10: note = Description of sequence: Splice site sequence
caggtgtcag

SEQ ID NO: 1425 - RNA, 10 nt, synthetic construct
  source 1..10: mol_type = other RNA
  misc_feature 1..10: note = Description of sequence: Splice site sequence
caggtgtcca

SEQ ID NO: 1426 - RNA, 10 nt, synthetic construct
  source 1..10: mol_type = other RNA
  misc_feature 1..10: note = Description of sequence: Splice site sequence
caggtgtcct

SEQ ID NO: 1427 - RNA, 10 nt, synthetic construct
  source 1..10: mol_type = other RNA
  misc_feature 1..10: note = Description of sequence: Splice site sequence
caggtgtcta

SEQ ID NO: 1428 - RNA, 10 nt, synthetic construct
  source 1..10: mol_type = other RNA
  misc_feature 1..10: note = Description of sequence: Splice site sequence
caggtgtctc

SEQ ID NO: 1429 - RNA, 10 nt, synthetic construct
  source 1..10: mol_type = other RNA
  misc_feature 1..10: note = Description of sequence: Splice site sequence
caggtgtctg

SEQ ID NO: 1430 - RNA, 10 nt, synthetic construct
  source 1..10: mol_type = other RNA
  misc_feature 1..10: note = Description of sequence: Splice site sequence
caggtgtgaa

SEQ ID NO: 1431 - RNA, 10 nt, synthetic construct
  source 1..10: mol_type = other RNA
  misc_feature 1..10: note = Description of sequence: Splice site sequence
caggtgtgac

SEQ ID NO: 1432 - RNA, 10 nt, synthetic construct
  source 1..10: mol_type = other RNA
  misc_feature 1..10: note = Description of sequence: Splice site sequence
caggtgtgag

SEQ ID NO: 1433 - RNA, 10 nt, synthetic construct
  source 1..10: mol_type = other RNA
  misc_feature 1..10: note = Description of sequence: Splice site sequence
caggtgtgat

SEQ ID NO: 1434 - RNA, 10 nt, synthetic construct
  source 1..10: mol_type = other RNA
  misc_feature 1..10: note = Description of sequence: Splice site sequence
caggtgtgca

SEQ ID NO: 1435 - RNA, 10 nt, synthetic construct
  source 1..10: mol_type = other RNA
  misc_feature 1..10: note = Description of sequence: Splice site sequence
caggtgtgcc

SEQ ID NO: 1436 - RNA, 10 nt, synthetic construct
  source 1..10: mol_type = other RNA
  misc_feature 1..10: note = Description of sequence: Splice site sequence
caggtgtgcg

SEQ ID NO: 1437 - RNA, 10 nt, synthetic construct
  source 1..10: mol_type = other RNA
  misc_feature 1..10: note = Description of sequence: Splice site sequence
caggtgtgct

SEQ ID NO: 1438 - RNA, 10 nt, synthetic construct
  source 1..10: mol_type = other RNA
  misc_feature 1..10: note = Description of sequence: Splice site sequence
caggtgtgga

SEQ ID NO: 1439 - RNA, 10 nt, synthetic construct
  source 1..10: mol_type = other RNA
  misc_feature 1..10: note = Description of sequence: Splice site sequence
caggtgtggc

SEQ ID NO: 1440 - RNA, 10 nt, synthetic construct
  source 1..10: mol_type = other RNA
  misc_feature 1..10: note = Description of sequence: Splice site sequence
caggtgtgta

SEQ ID NO: 1441 - RNA, 10 nt, synthetic construct
  source 1..10: mol_type = other RNA
  misc_feature 1..10: note = Description of sequence: Splice site sequence
caggtgtgtc

SEQ ID NO: 1442 - RNA, 10 nt, synthetic construct
  source 1..10: mol_type = other RNA
  misc_feature 1..10: note = Description of sequence: Splice site sequence
caggtgtgtg

SEQ ID NO: 1443 - RNA, 10 nt, synthetic construct
  source 1..10: mol_type = other RNA
  misc_feature 1..10: note = Description of sequence: Splice site sequence
caggtgtgtt

SEQ ID NO: 1444 - RNA, 10 nt, synthetic construct
  source 1..10: mol_type = other RNA
  misc_feature 1..10: note = Description of sequence: Splice site sequence
caggtgttta

SEQ ID NO: 1445 - RNA, 10 nt, synthetic construct
  source 1..10: mol_type = other RNA
  misc_feature 1..10: note = Description of sequence: Splice site sequence
caggttaaaa

SEQ ID NO: 1446 - RNA, 10 nt, synthetic construct
  source 1..10: mol_type = other RNA
  misc_feature 1..10: note = Description of sequence: Splice site sequence
caggttaata

SEQ ID NO: 1447 - RNA, 10 nt, synthetic construct
  source 1..10: mol_type = other RNA
  misc_feature 1..10: note = Description of sequence: Splice site sequence
caggttaatc

SEQ ID NO: 1448 - RNA, 10 nt, synthetic construct
  source 1..10: mol_type = other RNA
  misc_feature 1..10: note = Description of sequence: Splice site sequence
caggttacct

SEQ ID NO: 1449 - RNA, 10 nt, synthetic construct
  source 1..10: mol_type = other RNA
  misc_feature 1..10: note = Description of sequence: Splice site sequence
caggttagaa

SEQ ID NO: 1450 - RNA, 10 nt, synthetic construct
  source 1..10: mol_type = other RNA
  misc_feature 1..10: note = Description of sequence: Splice site sequence
caggttagag

SEQ ID NO: 1451 - RNA, 10 nt, synthetic construct
  source 1..10: mol_type = other RNA
  misc_feature 1..10: note = Description of sequence: Splice site sequence
caggttagat

SEQ ID NO: 1452 - RNA, 10 nt, synthetic construct
  source 1..10: mol_type = other RNA
  misc_feature 1..10: note = Description of sequence: Splice site sequence
caggttagcc

SEQ ID NO: 1453 - RNA, 10 nt, synthetic construct
  source 1..10: mol_type = other RNA
  misc_feature 1..10: note = Description of sequence: Splice site sequence
caggttaggg

SEQ ID NO: 1454 - RNA, 10 nt, synthetic construct
  source 1..10: mol_type = other RNA
  misc_feature 1..10: note = Description of sequence: Splice site sequence
caggttaggt

SEQ ID NO: 1455 - RNA, 10 nt, synthetic construct
  source 1..10: mol_type = other RNA
  misc_feature 1..10: note = Description of sequence: Splice site sequence
caggttagta

SEQ ID NO: 1456 - RNA, 10 nt, synthetic construct
  source 1..10: mol_type = other RNA
  misc_feature 1..10: note = Description of sequence: Splice site sequence
caggttagtc

SEQ ID NO: 1457 - RNA, 10 nt, synthetic construct
  source 1..10: mol_type = other RNA
  misc_feature 1..10: note = Description of sequence: Splice site sequence
caggttagtg

SEQ ID NO: 1458 - RNA, 10 nt, synthetic construct
  source 1..10: mol_type = other RNA
  misc_feature 1..10: note = Description of sequence: Splice site sequence
caggttagtt

SEQ ID NO: 1459 - RNA, 10 nt, synthetic construct
  source 1..10: mol_type = other RNA
  misc_feature 1..10: note = Description of sequence: Splice site sequence
caggttatca

SEQ ID NO: 1460 - RNA, 10 nt, synthetic construct
  source 1..10: mol_type = other RNA
  misc_feature 1..10: note = Description of sequence: Splice site sequence
caggttatgt

SEQ ID NO: 1461 - RNA, 10 nt, synthetic construct
  source 1..10: mol_type = other RNA
  misc_feature 1..10: note = Description of sequence: Splice site sequence
caggttatta

SEQ ID NO: 1462 - RNA, 10 nt, synthetic construct
  source 1..10: mol_type = other RNA
  misc_feature 1..10: note = Description of sequence: Splice site sequence
caggttattg

SEQ ID NO: 1463 - RNA, 10 nt, synthetic construct
  source 1..10: mol_type = other RNA
  misc_feature 1..10: note = Description of sequence: Splice site sequence
caggttcaaa

SEQ ID NO: 1464 - RNA, 10 nt, synthetic construct
  source 1..10: mol_type = other RNA
  misc_feature 1..10: note = Description of sequence: Splice site sequence
caggttcaac

SEQ ID NO: 1465 - RNA, 10 nt, synthetic construct
  source 1..10: mol_type = other RNA
  misc_feature 1..10: note = Description of sequence: Splice site sequence
caggttcaag

SEQ ID NO: 1466 - RNA, 10 nt, synthetic construct
  source 1..10: mol_type = other RNA
  misc_feature 1..10: note = Description of sequence: Splice site sequence
caggttcaca

SEQ ID NO: 1467 - RNA, 10 nt, synthetic construct
  source 1..10: mol_type = other RNA
  misc_feature 1..10: note = Description of sequence: Splice site sequence
caggttcacg

SEQ ID NO: 1468 - RNA, 10 nt, synthetic construct
  source 1..10: mol_type = other RNA
  misc_feature 1..10: note = Description of sequence: Splice site sequence
caggttcagg

SEQ ID NO: 1469 - RNA, 10 nt, synthetic construct
  source 1..10: mol_type = other RNA
  misc_feature 1..10: note = Description of sequence: Splice site sequence
caggttcatg

SEQ ID NO: 1470 - RNA, 10 nt, synthetic construct
  source 1..10: mol_type = other RNA
  misc_feature 1..10: note = Description of sequence: Splice site sequence
caggttccag

SEQ ID NO: 1471 - RNA, 10 nt, synthetic construct
  source 1..10: mol_type = other RNA
  misc_feature 1..10: note = Description of sequence: Splice site sequence
caggttccca

SEQ ID NO: 1472 - RNA, 10 nt, synthetic construct
  source 1..10: mol_type = other RNA
  misc_feature 1..10: note = Description of sequence: Splice site sequence
caggttcccg

SEQ ID NO: 1473 - RNA, 10 nt, synthetic construct
  source 1..10: mol_type = other RNA
  misc_feature 1..10: note = Description of sequence: Splice site sequence
caggttcgaa

SEQ ID NO: 1474 - RNA, 10 nt, synthetic construct
  source 1..10: mol_type = other RNA
  misc_feature 1..10: note = Description of sequence: Splice site sequence
caggttcgag

SEQ ID NO: 1475 - RNA, 10 nt, synthetic construct
  source 1..10: mol_type = other RNA
  misc_feature 1..10: note = Description of sequence: Splice site sequence
caggttctat

SEQ ID NO: 1476 - RNA, 10 nt, synthetic construct
  source 1..10: mol_type = other RNA
  misc_feature 1..10: note = Description of sequence: Splice site sequence
caggttctgc

SEQ ID NO: 1477 - RNA, 10 nt, synthetic construct
  source 1..10: mol_type = other RNA
  misc_feature 1..10: note = Description of sequence: Splice site sequence
caggttctta

SEQ ID NO: 1478 - RNA, 10 nt, synthetic construct
  source 1..10: mol_type = other RNA
  misc_feature 1..10: note = Description of sequence: Splice site sequence
caggttcttc

SEQ ID NO: 1479 - RNA, 10 nt, synthetic construct
  source 1..10: mol_type = other RNA
  misc_feature 1..10: note = Description of sequence: Splice site sequence
caggttcttt

SEQ ID NO: 1480 - RNA, 10 nt, synthetic construct
  source 1..10: mol_type = other RNA
  misc_feature 1..10: note = Description of sequence: Splice site sequence
caggttgaac

SEQ ID NO: 1481 - RNA, 10 nt, synthetic construct
  source 1..10: mol_type = other RNA
  misc_feature 1..10: note = Description of sequence: Splice site sequence
caggttgaag

SEQ ID NO: 1482 - RNA, 10 nt, synthetic construct
  source 1..10: mol_type = other RNA
  misc_feature 1..10: note = Description of sequence: Splice site sequence
caggttgagt

SEQ ID NO: 1483 - RNA, 10 nt, synthetic construct
  source 1..10: mol_type = other RNA
  misc_feature 1..10: note = Description of sequence: Splice site sequence
caggttgata

SEQ ID NO: 1484 - RNA, 10 nt, synthetic construct
  source 1..10: mol_type = other RNA
  misc_feature 1..10: note = Description of sequence: Splice site sequence
caggttggag

SEQ ID NO: 1485 - RNA, 10 nt, synthetic construct
  source 1..10: mol_type = other RNA
  misc_feature 1..10: note = Description of sequence: Splice site sequence
caggttggca

SEQ ID NO: 1486 - RNA, 10 nt, synthetic construct
  source 1..10: mol_type = other RNA
  misc_feature 1..10: note = Description of sequence: Splice site sequence
caggttggcc

SEQ ID NO: 1487 - RNA, 10 nt, synthetic construct
  source 1..10: mol_type = other RNA
  misc_feature 1..10: note = Description of sequence: Splice site sequence
caggttggtc

SEQ ID NO: 1488 - RNA, 10 nt, synthetic construct
  source 1..10: mol_type = other RNA
  misc_feature 1..10: note = Description of sequence: Splice site sequence
caggttggtg

SEQ ID NO: 1489 - RNA, 10 nt, synthetic construct
  source 1..10: mol_type = other RNA
  misc_feature 1..10: note = Description of sequence: Splice site sequence
caggttggtt

SEQ ID NO: 1490 - RNA, 10 nt, synthetic construct
  source 1..10: mol_type = other RNA
  misc_feature 1..10: note = Description of sequence: Splice site sequence
caggttgtaa

SEQ ID NO: 1491 - RNA, 10 nt, synthetic construct
  source 1..10: mol_type = other RNA
  misc_feature 1..10: note = Description of sequence: Splice site sequence
caggttgtac

SEQ ID NO: 1492 - RNA, 10 nt, synthetic construct
  source 1..10: mol_type = other RNA
  misc_feature 1..10: note = Description of sequence: Splice site sequence
caggttgtat

SEQ ID NO: 1493 - RNA, 10 nt, synthetic construct
  source 1..10: mol_type = other RNA
  misc_feature 1..10: note = Description of sequence: Splice site sequence
caggttgtca

SEQ ID NO: 1494 - RNA, 10 nt, synthetic construct
  source 1..10: mol_type = other RNA
  misc_feature 1..10: note = Description of sequence: Splice site sequence
caggttgtga

SEQ ID NO: 1495 - RNA, 10 nt, synthetic construct
  source 1..10: mol_type = other RNA
  misc_feature 1..10: note = Description of sequence: Splice site sequence
caggttgttg

SEQ ID NO: 1496 - RNA, 10 nt, synthetic construct
  source 1..10: mol_type = other RNA
  misc_feature 1..10: note = Description of sequence: Splice site sequence
caggtttaag

SEQ ID NO: 1497 - RNA, 10 nt, synthetic construct
  source 1..10: mol_type = other RNA
  misc_feature 1..10: note = Description of sequence: Splice site sequence
caggtttacc

SEQ ID NO: 1498 - RNA, 10 nt, synthetic construct
  source 1..10: mol_type = other RNA
  misc_feature 1..10: note = Description of sequence: Splice site sequence
caggtttagc

SEQ ID NO: 1499 - RNA, 10 nt, synthetic construct
  source 1..10: mol_type = other RNA
  misc_feature 1..10: note = Description of sequence: Splice site sequence
caggtttagt

SEQ ID NO: 1500 - RNA, 10 nt, synthetic construct
  source 1..10: mol_type = other RNA
  misc_feature 1..10: note = Description of sequence: Splice site sequence
caggtttctt

SEQ ID NO: 1501 - RNA, 10 nt, synthetic construct
  source 1..10: mol_type = other RNA
  misc_feature 1..10: note = Description of sequence: Splice site sequence
caggtttgaa

SEQ ID NO: 1502 - RNA, 10 nt, synthetic construct
  source 1..10: mol_type = other RNA
  misc_feature 1..10: note = Description of sequence: Splice site sequence
caggtttgag

SEQ ID NO: 1503 - RNA, 10 nt, synthetic construct
  source 1..10: mol_type = other RNA
  misc_feature 1..10: note = Description of sequence: Splice site sequence
caggtttgat

SEQ ID NO: 1504 - RNA, 10 nt, synthetic construct
  source 1..10: mol_type = other RNA
  misc_feature 1..10: note = Description of sequence: Splice site sequence
caggtttgcc

SEQ ID NO: 1505 - RNA, 10 nt, synthetic construct
  source 1..10: mol_type = other RNA
  misc_feature 1..10: note = Description of sequence: Splice site sequence
caggtttgct

SEQ ID NO: 1506 - RNA, 10 nt, synthetic construct
  source 1..10: mol_type = other RNA
  misc_feature 1..10: note = Description of sequence: Splice site sequence
caggtttggg

SEQ ID NO: 1507 - RNA, 10 nt, synthetic construct
  source 1..10: mol_type = other RNA
  misc_feature 1..10: note = Description of sequence: Splice site sequence
caggtttggt

SEQ ID NO: 1508 - RNA, 10 nt, synthetic construct
  source 1..10: mol_type = other RNA
  misc_feature 1..10: note = Description of sequence: Splice site sequence
caggtttgta

SEQ ID NO: 1509 - RNA, 10 nt, synthetic construct
  source 1..10: mol_type = other RNA
  misc_feature 1..10: note = Description of sequence: Splice site sequence
caggtttgtg

SEQ ID NO: 1510 - RNA, 10 nt, synthetic construct
  source 1..10: mol_type = other RNA
  misc_feature 1..10: note = Description of sequence: Splice site sequence
caggtttgtt

SEQ ID NO: 1511 - RNA, 10 nt, synthetic construct
  source 1..10: mol_type = other RNA
  misc_feature 1..10: note = Description of sequence: Splice site sequence
caggttttct

SEQ ID NO: 1512 - RNA, 10 nt, synthetic construct
  source 1..10: mol_type = other RNA
  misc_feature 1..10: note = Description of sequence: Splice site sequence
caggttttgg

SEQ ID NO: 1513 - RNA, 10 nt, synthetic construct
  source 1..10: mol_type = other RNA
  misc_feature 1..10: note = Description of sequence: Splice site sequence
caggtttttc

SEQ ID NO: 1514 - RNA, 10 nt, synthetic construct
  source 1..10: mol_type = other RNA
  misc_feature 1..10: note = Description of sequence: Splice site sequence
caggtttttt

SEQ ID NO: 1515 - RNA, 10 nt, synthetic construct
  source 1..10: mol_type = other RNA
  misc_feature 1..10: note = Description of sequence: Splice site sequence
catgcaggtt

SEQ ID NO: 1516 - RNA, 10 nt, synthetic construct
  source 1..10: mol_type = other RNA
  misc_feature 1..10: note = Description of sequence: Splice site sequence
catgtaaaac

SEQ ID NO: 1517 - RNA, 10 nt, synthetic construct
  source 1..10: mol_type = other RNA
  misc_feature 1..10: note = Description of sequence: Splice site sequence
catgtaacta

SEQ ID NO: 1518 - RNA, 10 nt, synthetic construct
  source 1..10: mol_type = other RNA
  misc_feature 1..10: note = Description of sequence: Splice site sequence
catgtaagaa

SEQ ID NO: 1519 - RNA, 10 nt, synthetic construct
  source 1..10: mol_type = other RNA
  misc_feature 1..10: note = Description of sequence: Splice site sequence
catgtaagag

SEQ ID NO: 1520 - RNA, 10 nt, synthetic construct
  source 1..10: mol_type = other RNA
  misc_feature 1..10: note = Description of sequence: Splice site sequence
catgtaagat

SEQ ID NO: 1521 - RNA, 10 nt, synthetic construct
  source 1..10: mol_type = other RNA
  misc_feature 1..10: note = Description of sequence: Splice site sequence
catgtaagcc

SEQ ID NO: 1522 - RNA, 10 nt, synthetic construct
  source 1..10: mol_type = other RNA
  misc_feature 1..10: note = Description of sequence: Splice site sequence
catgtaagta

SEQ ID NO: 1523 - RNA, 10 nt, synthetic construct
  source 1..10: mol_type = other RNA
  misc_feature 1..10: note = Description of sequence: Splice site sequence
catgtaagtg

SEQ ID NO: 1524 - RNA, 10 nt, synthetic construct
  source 1..10: mol_type = other RNA
  misc_feature 1..10: note = Description of sequence: Splice site sequence
catgtaagtt

SEQ ID NO: 1525 - RNA, 10 nt, synthetic construct
  source 1..10: mol_type = other RNA
  misc_feature 1..10: note = Description of sequence: Splice site sequence
catgtaatta

SEQ ID NO: 1526 - RNA, 10 nt, synthetic construct
  source 1..10: mol_type = other RNA
  misc_feature 1..10: note = Description of sequence: Splice site sequence
catgtacata

SEQ ID NO: 1527 - RNA, 10 nt, synthetic construct
  source 1..10: mol_type = other RNA
  misc_feature 1..10: note = Description of sequence: Splice site sequence
catgtaccac

SEQ ID NO: 1528 - RNA, 10 nt, synthetic construct
  source 1..10: mol_type = other RNA
  misc_feature 1..10: note = Description of sequence: Splice site sequence
catgtacgtt

SEQ ID NO: 1529 - RNA, 10 nt, synthetic construct
  source 1..10: mol_type = other RNA
  misc_feature 1..10: note = Description of sequence: Splice site sequence
catgtaggta

SEQ ID NO: 1530 - RNA, 10 nt, synthetic construct
  source 1..10: mol_type = other RNA
  misc_feature 1..10: note = Description of sequence: Splice site sequence
catgtaggtg

SEQ ID NO: 1531 - RNA, 10 nt, synthetic construct
  source 1..10: mol_type = other RNA
  misc_feature 1..10: note = Description of sequence: Splice site sequence
catgtaggtt

SEQ ID NO: 1532 - RNA, 10 nt, synthetic construct
  source 1..10: mol_type = other RNA
  misc_feature 1..10: note = Description of sequence: Splice site sequence
catgtatgaa

SEQ ID NO: 1533 - RNA, 10 nt, synthetic construct
  source 1..10: mol_type = other RNA
  misc_feature 1..10: note = Description of sequence: Splice site sequence
catgtatgta

SEQ ID NO: 1534 - RNA, 10 nt, synthetic construct
  source 1..10: mol_type = other RNA
  misc_feature 1..10: note = Description of sequence: Splice site sequence
catgtatgtg

SEQ ID NO: 1535 - RNA, 10 nt, synthetic construct
  source 1..10: mol_type = other RNA
  misc_feature 1..10: note = Description of sequence: Splice site sequence
catgtatgtt

SEQ ID NO: 1536 - RNA, 10 nt, synthetic construct
  source 1..10: mol_type = other RNA
  misc_feature 1..10: note = Description of sequence: Splice site sequence
catgtgagaa

SEQ ID NO: 1537 - RNA, 10 nt, synthetic construct
  source 1..10: mol_type = other RNA
  misc_feature 1..10: note = Description of sequence: Splice site sequence
catgtgagca

SEQ ID NO: 1538 - RNA, 10 nt, synthetic construct
  source 1..10: mol_type = other RNA
  misc_feature 1..10: note = Description of sequence: Splice site sequence
catgtgagct

SEQ ID NO: 1539 - RNA, 10 nt, synthetic construct
  source 1..10: mol_type = other RNA
  misc_feature 1..10: note = Description of sequence: Splice site sequence
catgtgagta

SEQ ID NO: 1540 - RNA, 10 nt, synthetic construct
  source 1..10: mol_type = other RNA
  misc_feature 1..10: note = Description of sequence: Splice site sequence
catgtgagtc

SEQ ID NO: 1541 - RNA, 10 nt, synthetic construct
  source 1..10: mol_type = other RNA
  misc_feature 1..10: note = Description of sequence: Splice site sequence
catgtgagtg

SEQ ID NO: 1542 - RNA, 10 nt, synthetic construct
  source 1..10: mol_type = other RNA
  misc_feature 1..10: note = Description of sequence: Splice site sequence
catgtgagtt

SEQ ID NO: 1543 - RNA, 10 nt, synthetic construct
  source 1..10: mol_type = other RNA
  misc_feature 1..10: note = Description of sequence: Splice site sequence
catgtgcgta

SEQ ID NO: 1544 - RNA, 10 nt, synthetic construct
  source 1..10: mol_type = other RNA
  misc_feature 1..10: note = Description of sequence: Splice site sequence
catgtgggaa

SEQ ID NO: 1545 - RNA, 10 nt, synthetic construct
  source 1..10: mol_type = other RNA
  misc_feature 1..10: note = Description of sequence: Splice site sequence
catgtgggtt

SEQ ID NO: 1546 - RNA, 10 nt, synthetic construct
  source 1..10: mol_type = other RNA
  misc_feature 1..10: note = Description of sequence: Splice site sequence
catgtgtgtg

SEQ ID NO: 1547 - RNA, 10 nt, synthetic construct
  source 1..10: mol_type = other RNA
  misc_feature 1..10: note = Description of sequence: Splice site sequence
catgtgtgtt

SEQ ID NO: 1548 - RNA, 10 nt, synthetic construct
  source 1..10: mol_type = other RNA
  misc_feature 1..10: note = Description of sequence: Splice site sequence
catgttaata

SEQ ID NO: 1549 - RNA, 10 nt, synthetic construct
  source 1..10: mol_type = other RNA
  misc_feature 1..10: note = Description of sequence: Splice site sequence
catgttagcc

SEQ ID NO: 1550 - RNA, 10 nt, synthetic construct
  source 1..10: mol_type = other RNA
  misc_feature 1..10: note = Description of sequence: Splice site sequence
ccagtaagat

SEQ ID NO: 1551 - RNA, 10 nt, synthetic construct
  source 1..10: mol_type = other RNA
  misc_feature 1..10: note = Description of sequence: Splice site sequence
ccagtaagca

SEQ ID NO: 1552 - RNA, 10 nt, synthetic construct
  source 1..10: mol_type = other RNA
  misc_feature 1..10: note = Description of sequence: Splice site sequence
ccagtaagcc

SEQ ID NO: 1553 - RNA, 10 nt, synthetic construct
  source 1..10: mol_type = other RNA
  misc_feature 1..10: note = Description of sequence: Splice site sequence
ccagtaagct

SEQ ID NO: 1554 - RNA, 10 nt, synthetic construct
  source 1..10: mol_type = other RNA
  misc_feature 1..10: note = Description of sequence: Splice site sequence
ccagtaagga

SEQ ID NO: 1555 - RNA, 10 nt, synthetic construct
  source 1..10: mol_type = other RNA
  misc_feature 1..10: note = Description of sequence: Splice site sequence
ccagtaagta

SEQ ID NO: 1556 - RNA, 10 nt, synthetic construct
  source 1..10: mol_type = other RNA
  misc_feature 1..10: note = Description of sequence: Splice site sequence
ccagtaagtc

SEQ ID NO: 1557 - RNA, 10 nt, synthetic construct
  source 1..10: mol_type = other RNA
  misc_feature 1..10: note = Description of sequence: Splice site sequence
ccagtaagtg

SEQ ID NO: 1558 - RNA, 10 nt, synthetic construct
  source 1..10: mol_type = other RNA
  misc_feature 1..10: note = Description of sequence: Splice site sequence
ccagtaagtt

SEQ ID NO: 1559 - RNA, 10 nt, synthetic construct
  source 1..10: mol_type = other RNA
  misc_feature 1..10: note = Description of sequence: Splice site sequence
ccagtaattg

SEQ ID NO: 1560 - RNA, 10 nt, synthetic construct
  source 1..10: mol_type = other RNA
  misc_feature 1..10: note = Description of sequence: Splice site sequence
ccagtacggg

SEQ ID NO: 1561 - RNA, 10 nt, synthetic construct
  source 1..10: mol_type = other RNA
  misc_feature 1..10: note = Description of sequence: Splice site sequence
ccagtaggtc

SEQ ID NO: 1562 - RNA, 10 nt, synthetic construct
  source 1..10: mol_type = other RNA
  misc_feature 1..10: note = Description of sequence: Splice site sequence
ccagtattgt

SEQ ID NO: 1563 - RNA, 10 nt, synthetic construct
  source 1..10: mol_type = other RNA
  misc_feature 1..10: note = Description of sequence: Splice site sequence
ccagtgaggc

SEQ ID NO: 1564 - RNA, 10 nt, synthetic construct
  source 1..10: mol_type = other RNA
  misc_feature 1..10: note = Description of sequence: Splice site sequence
ccagtgagta

SEQ ID NO: 1565 - RNA, 10 nt, synthetic construct
  source 1..10: mol_type = other RNA
  misc_feature 1..10: note = Description of sequence: Splice site sequence
ccagtgagtg

SEQ ID NO: 1566 - RNA, 10 nt, synthetic construct
  source 1..10: mol_type = other RNA
  misc_feature 1..10: note = Description of sequence: Splice site sequence
ccagtgggtc

SEQ ID NO: 1567 - RNA, 10 nt, synthetic construct
  source 1..10: mol_type = other RNA
  misc_feature 1..10: note = Description of sequence: Splice site sequence
ccagttagtt

SEQ ID NO: 1568 - RNA, 10 nt, synthetic construct
  source 1..10: mol_type = other RNA
  misc_feature 1..10: note = Description of sequence: Splice site sequence
ccagttgagt

SEQ ID NO: 1569 - RNA, 10 nt, synthetic construct
  source 1..10: mol_type = other RNA
  misc_feature 1..10: note = Description of sequence: Splice site sequence
cccgtaagat

SEQ ID NO: 1570 - RNA, 10 nt, synthetic construct
  source 1..10: mol_type = other RNA
  misc_feature 1..10: note = Description of sequence: Splice site sequence
cccgtatgtc

SEQ ID NO: 1571 - RNA, 10 nt, synthetic construct
  source 1..10: mol_type = other RNA
  misc_feature 1..10: note = Description of sequence: Splice site sequence
cccgtatgtt

SEQ ID NO: 1572 - RNA, 10 nt, synthetic construct
  source 1..10: mol_type = other RNA
  misc_feature 1..10: note = Description of sequence: Splice site sequence
cccgtcctgc

SEQ ID NO: 1573 - RNA, 10 nt, synthetic construct
  source 1..10: mol_type = other RNA
  misc_feature 1..10: note = Description of sequence: Splice site sequence
cccgtgagtg

SEQ ID NO: 1574 - RNA, 10 nt, synthetic construct
  source 1..10: mol_type = other RNA
  misc_feature 1..10: note = Description of sequence: Splice site sequence
ccggtaaaga

SEQ ID NO: 1575 - RNA, 10 nt, synthetic construct
  source 1..10: mol_type = other RNA
  misc_feature 1..10: note = Description of sequence: Splice site sequence
ccggtaagat

SEQ ID NO: 1576 - RNA, 10 nt, synthetic construct
  source 1..10: mol_type = other RNA
  misc_feature 1..10: note = Description of sequence: Splice site sequence
ccggtaagcc

SEQ ID NO: 1577 - RNA, 10 nt, synthetic construct
  source 1..10: mol_type = other RNA
  misc_feature 1..10: note = Description of sequence: Splice site sequence
ccggtaagga

SEQ ID NO: 1578 - RNA, 10 nt, synthetic construct
  source 1..10: mol_type = other RNA
  misc_feature 1..10: note = Description of sequence: Splice site sequence
ccggtaaggc

SEQ ID NO: 1579 - RNA, 10 nt, synthetic construct
  source 1..10: mol_type = other RNA
  misc_feature 1..10: note = Description of sequence: Splice site sequence
ccggtaatgg

SEQ ID NO: 1580 - RNA, 10 nt, synthetic construct
  source 1..10: mol_type = other RNA
  misc_feature 1..10: note = Description of sequence: Splice site sequence
ccggtacagt

SEQ ID NO: 1581 - RNA, 10 nt, synthetic construct
  source 1..10: mol_type = other RNA
  misc_feature 1..10: note = Description of sequence: Splice site sequence
ccggtactga

SEQ ID NO: 1582 - RNA, 10 nt, synthetic construct
  source 1..10: mol_type = other RNA
  misc_feature 1..10: note = Description of sequence: Splice site sequence
ccggtattcc

SEQ ID NO: 1583 - RNA, 10 nt, synthetic construct
  source 1..10: mol_type = other RNA
  misc_feature 1..10: note = Description of sequence: Splice site sequence
ccggtcagtg

SEQ ID NO: 1584 - RNA, 10 nt, synthetic construct
  source 1..10: mol_type = other RNA
  misc_feature 1..10: note = Description of sequence: Splice site sequence
ccggtgaaaa

SEQ ID NO: 1585 - RNA, 10 nt, synthetic construct
  source 1..10: mol_type = other RNA
  misc_feature 1..10: note = Description of sequence: Splice site sequence
ccggtgagaa

SEQ ID NO: 1586 - RNA, 10 nt, synthetic construct
  source 1..10: mol_type = other RNA
  misc_feature 1..10: note = Description of sequence: Splice site sequence
ccggtgaggg

SEQ ID NO: 1587 - RNA, 10 nt, synthetic construct
  source 1..10: mol_type = other RNA
  misc_feature 1..10: note = Description of sequence: Splice site sequence
ccggtgagtg

SEQ ID NO: 1588 - RNA, 10 nt, synthetic construct
  source 1..10: mol_type = other RNA
  misc_feature 1..10: note = Description of sequence: Splice site sequence
ccggtgagtt

SEQ ID NO: 1589 - RNA, 10 nt, synthetic construct
  source 1..10: mol_type = other RNA
  misc_feature 1..10: note = Description of sequence: Splice site sequence
ccggtgcgcg

SEQ ID NO: 1590 - RNA, 10 nt, synthetic construct
  source 1..10: mol_type = other RNA
  misc_feature 1..10: note = Description of sequence: Splice site sequence
ccggtgggcg

SEQ ID NO: 1591 - RNA, 10 nt, synthetic construct
  source 1..10: mol_type = other RNA
  misc_feature 1..10: note = Description of sequence: Splice site sequence
ccggttggtc

SEQ ID NO: 1592 - RNA, 10 nt, synthetic construct
  source 1..10: mol_type = other RNA
  misc_feature 1..10: note = Description of sequence: Splice site sequence
cctgtaaatg

SEQ ID NO: 1593 - RNA, 10 nt, synthetic construct
  source 1..10: mol_type = other RNA
  misc_feature 1..10: note = Description of sequence: Splice site sequence
cctgtaaatt

SEQ ID NO: 1594 - RNA, 10 nt, synthetic construct
  source 1..10: mol_type = other RNA
  misc_feature 1..10: note = Description of sequence: Splice site sequence
cctgtaagaa

SEQ ID NO: 1595 - RNA, 10 nt, synthetic construct
  source 1..10: mol_type = other RNA
  misc_feature 1..10: note = Description of sequence: Splice site sequence
cctgtaagac

SEQ ID NO: 1596 - RNA, 10 nt, synthetic construct
  source 1..10: mol_type = other RNA
  misc_feature 1..10: note = Description of sequence: Splice site sequence
cctgtaagag

SEQ ID NO: 1597 - RNA, 10 nt, synthetic construct
  source 1..10: mol_type = other RNA
  misc_feature 1..10: note = Description of sequence: Splice site sequence
cctgtaagca

SEQ ID NO: 1598 - RNA, 10 nt, synthetic construct
  source 1..10: mol_type = other RNA
  misc_feature 1..10: note = Description of sequence: Splice site sequence
cctgtaagcg

SEQ ID NO: 1599 - RNA, 10 nt, synthetic construct
  source 1..10: mol_type = other RNA
  misc_feature 1..10: note = Description of sequence: Splice site sequence
cctgtaagga

SEQ ID NO: 1600 - RNA, 10 nt, synthetic construct
  source 1..10: mol_type = other RNA
  misc_feature 1..10: note = Description of sequence: Splice site sequence
cctgtaagtt

SEQ ID NO: 1601 - RNA, 10 nt, synthetic construct
  source 1..10: mol_type = other RNA
  misc_feature 1..10: note = Description of sequence: Splice site sequence
cctgtaggta

SEQ ID NO: 1602 - RNA, 10 nt, synthetic construct
  source 1..10: mol_type = other RNA
  misc_feature 1..10: note = Description of sequence: Splice site sequence
cctgtaggtg

SEQ ID NO: 1603 - RNA, 10 nt, synthetic construct
  source 1..10: mol_type = other RNA
  misc_feature 1..10: note = Description of sequence: Splice site sequence
cctgtatctt

SEQ ID NO: 1604 - RNA, 10 nt, synthetic construct
  source 1..10: mol_type = other RNA
  misc_feature 1..10: note = Description of sequence: Splice site sequence
cctgtatggt

SEQ ID NO: 1605 - RNA, 10 nt, synthetic construct
  source 1..10: mol_type = other RNA
  misc_feature 1..10: note = Description of sequence: Splice site sequence
cctgtatgtg

SEQ ID NO: 1606 - RNA, 10 nt, synthetic construct
  source 1..10: mol_type = other RNA
  misc_feature 1..10: note = Description of sequence: Splice site sequence
cctgtgagaa

SEQ ID NO: 1607 - RNA, 10 nt, synthetic construct
  source 1..10: mol_type = other RNA
  misc_feature 1..10: note = Description of sequence: Splice site sequence
cctgtgagca

SEQ ID NO: 1608 - RNA, 10 nt, synthetic construct
  source 1..10: mol_type = other RNA
  misc_feature 1..10: note = Description of sequence: Splice site sequence
cctgtgaggg

SEQ ID NO: 1609 - RNA, 10 nt, synthetic construct
  source 1..10: mol_type = other RNA
  misc_feature 1..10: note = Description of sequence: Splice site sequence
cctgtgagtc

SEQ ID NO: 1610 - RNA, 10 nt, synthetic construct
  source 1..10: mol_type = other RNA
  misc_feature 1..10: note = Description of sequence: Splice site sequence
cctgtgagtg

SEQ ID NO: 1611 - RNA, 10 nt, synthetic construct
  source 1..10: mol_type = other RNA
  misc_feature 1..10: note = Description of sequence: Splice site sequence
cctgtgagtt

SEQ ID NO: 1612 - RNA, 10 nt, synthetic construct
  source 1..10: mol_type = other RNA
  misc_feature 1..10: note = Description of sequence: Splice site sequence
cctgtggctc

SEQ ID NO: 1613 - RNA, 10 nt, synthetic construct
  source 1..10: mol_type = other RNA
  misc_feature 1..10: note = Description of sequence: Splice site sequence
cctgtgggta

SEQ ID NO: 1614 - RNA, 10 nt, synthetic construct
  source 1..10: mol_type = other RNA
  misc_feature 1..10: note = Description of sequence: Splice site sequence
cctgtgtgta

SEQ ID NO: 1615 - RNA, 10 nt, synthetic construct
  source 1..10: mol_type = other RNA
  misc_feature 1..10: note = Description of sequence: Splice site sequence
cctgttagaa

SEQ ID NO: 1616 - RNA, 10 nt, synthetic construct
  source 1..10: mol_type = other RNA
  misc_feature 1..10: note = Description of sequence: Splice site sequence
cgagtaaggg

SEQ ID NO: 1617 - RNA, 10 nt, synthetic construct
  source 1..10: mol_type = other RNA
  misc_feature 1..10: note = Description of sequence: Splice site sequence
cgagtaaggt

SEQ ID NO: 1618 - RNA, 10 nt, synthetic construct
  source 1..10: mol_type = other RNA
  misc_feature 1..10: note = Description of sequence: Splice site sequence
cgagtagctg

SEQ ID NO: 1619 - RNA, 10 nt, synthetic construct
  source 1..10: mol_type = other RNA
  misc_feature 1..10: note = Description of sequence: Splice site sequence
cgagtaggtg

SEQ ID NO: 1620 - RNA, 10 nt, synthetic construct
  source 1..10: mol_type = other RNA
  misc_feature 1..10: note = Description of sequence: Splice site sequence
cgagtaggtt

SEQ ID NO: 1621 - RNA, 10 nt, synthetic construct
  source 1..10: mol_type = other RNA
  misc_feature 1..10: note = Description of sequence: Splice site sequence
cgagtgagca

SEQ ID NO: 1622 - RNA, 10 nt, synthetic construct
  source 1..10: mol_type = other RNA
  misc_feature 1..10: note = Description of sequence: Splice site sequence
cgcgtaagag

SEQ ID NO: 1623 - RNA, 10 nt, synthetic construct
  source 1..10: mol_type = other RNA
  misc_feature 1..10: note = Description of sequence: Splice site sequence
cgggcaggca

SEQ ID NO: 1624 - RNA, 10 nt, synthetic construct
  source 1..10: mol_type = other RNA
  misc_feature 1..10: note = Description of sequence: Splice site sequence
cgggtaagcc

SEQ ID NO: 1625 - RNA, 10 nt, synthetic construct
  source 1..10: mol_type = other RNA
  misc_feature 1..10: note = Description of sequence: Splice site sequence
cgggtaagct

SEQ ID NO: 1626 - RNA, 10 nt, synthetic construct
  source 1..10: mol_type = other RNA
  misc_feature 1..10: note = Description of sequence: Splice site sequence
cgggtaagtt

SEQ ID NO: 1627 - RNA, 10 nt, synthetic construct
  source 1..10: mol_type = other RNA
  misc_feature 1..10: note = Description of sequence: Splice site sequence
cgggtaattc

SEQ ID NO: 1628 - RNA, 10 nt, synthetic construct
  source 1..10: mol_type = other RNA
  misc_feature 1..10: note = Description of sequence: Splice site sequence
cgggtaattt

SEQ ID NO: 1629 - RNA, 10 nt, synthetic construct
  source 1..10: mol_type = other RNA
  misc_feature 1..10: note = Description of sequence: Splice site sequence
cgggtacagt

SEQ ID NO: 1630 - RNA, 10 nt, synthetic construct
  source 1..10: mol_type = other RNA
  misc_feature 1..10: note = Description of sequence: Splice site sequence
cgggtacggg

SEQ ID NO: 1631 - RNA, 10 nt, synthetic construct
  source 1..10: mol_type = other RNA
  misc_feature 1..10: note = Description of sequence: Splice site sequence
cgggtaggag

SEQ ID NO: 1632 - RNA, 10 nt, synthetic construct
  source 1..10: mol_type = other RNA
  misc_feature 1..10: note = Description of sequence: Splice site sequence
cgggtaggcc

SEQ ID NO: 1633 - RNA, 10 nt, synthetic construct
  source 1..10: mol_type = other RNA
  misc_feature 1..10: note = Description of sequence: Splice site sequence
cgggtaggtg

SEQ ID NO: 1634 - RNA, 10 nt, synthetic construct
  source 1..10: mol_type = other RNA
  misc_feature 1..10: note = Description of sequence: Splice site sequence
cgggtattta

SEQ ID NO: 1635 - RNA, 10 nt, synthetic construct
  source 1..10: mol_type = other RNA
  misc_feature 1..10: note = Description of sequence: Splice site sequence
cgggtctgag

SEQ ID NO: 1636 - RNA, 10 nt, synthetic construct
  source 1..10: mol_type = other RNA
  misc_feature 1..10: note = Description of sequence: Splice site sequence
cgggtgaccg

SEQ ID NO: 1637 - RNA, 10 nt, synthetic construct
  source 1..10: mol_type = other RNA
  misc_feature 1..10: note = Description of sequence: Splice site sequence
cgggtgactc

SEQ ID NO: 1638 - RNA, 10 nt, synthetic construct
  source 1..10: mol_type = other RNA
  misc_feature 1..10: note = Description of sequence: Splice site sequence
cgggtgagaa

SEQ ID NO: 1639 - RNA, 10 nt, synthetic construct
  source 1..10: mol_type = other RNA
  misc_feature 1..10: note = Description of sequence: Splice site sequence
cgggtgaggg

SEQ ID NO: 1640 - RNA, 10 nt, synthetic construct
  source 1..10: mol_type = other RNA
  misc_feature 1..10: note = Description of sequence: Splice site sequence
cgggtgaggt

SEQ ID NO: 1641 - RNA, 10 nt, synthetic construct
  source 1..10: mol_type = other RNA
  misc_feature 1..10: note = Description of sequence: Splice site sequence
cgggtgagta

SEQ ID NO: 1642 - RNA, 10 nt, synthetic construct
  source 1..10: mol_type = other RNA
  misc_feature 1..10: note = Description of sequence: Splice site sequence
cgggtgagtg

SEQ ID NO: 1643 - RNA, 10 nt, synthetic construct
  source 1..10: mol_type = other RNA
  misc_feature 1..10: note = Description of sequence: Splice site sequence
cgggtgagtt

SEQ ID NO: 1644 - RNA, 10 nt, synthetic construct
  source 1..10: mol_type = other RNA
  misc_feature 1..10: note = Description of sequence: Splice site sequence
cgggtgattt

SEQ ID NO: 1645 - RNA, 10 nt, synthetic construct
  source 1..10: mol_type = other RNA
  misc_feature 1..10: note = Description of sequence: Splice site sequence
cgggtgcctt

SEQ ID NO: 1646 - RNA, 10 nt, synthetic construct
  source 1..10: mol_type = other RNA
  misc_feature 1..10: note = Description of sequence: Splice site sequence
cgggtgggag

SEQ ID NO: 1647 - RNA, 10 nt, synthetic construct
  source 1..10: mol_type = other RNA
  misc_feature 1..10: note = Description of sequence: Splice site sequence
cgggtgggtg

SEQ ID NO: 1648 - RNA, 10 nt, synthetic construct
  source 1..10: mol_type = other RNA
  misc_feature 1..10: note = Description of sequence: Splice site sequence
cgggtgggtt

SEQ ID NO: 1649 - RNA, 10 nt, synthetic construct
  source 1..10: mol_type = other RNA
  misc_feature 1..10: note = Description of sequence: Splice site sequence
cgggtgtgtc

SEQ ID NO: 1650 - RNA, 10 nt, synthetic construct
  source 1..10: mol_type = other RNA
  misc_feature 1..10: note = Description of sequence: Splice site sequence
cgggtgtgtg

SEQ ID NO: 1651 - RNA, 10 nt, synthetic construct
  source 1..10: mol_type = other RNA
  misc_feature 1..10: note = Description of sequence: Splice site sequence
cgggtgtgtt

SEQ ID NO: 1652 - RNA, 10 nt, synthetic construct
  source 1..10: mol_type = other RNA
  misc_feature 1..10: note = Description of sequence: Splice site sequence
cgggttcaag

SEQ ID NO: 1653 - RNA, 10 nt, synthetic construct
  source 1..10: mol_type = other RNA
  misc_feature 1..10: note = Description of sequence: Splice site sequence
cgggttcatg

SEQ ID NO: 1654 - RNA, 10 nt, synthetic construct
  source 1..10: mol_type = other RNA
  misc_feature 1..10: note = Description of sequence: Splice site sequence
cgggtttgct

SEQ ID NO: 1655 - RNA, 10 nt, synthetic construct
  source 1..10: mol_type = other RNA
  misc_feature 1..10: note = Description of sequence: Splice site sequence
cgtgtagggt

SEQ ID NO: 1656 - RNA, 10 nt, synthetic construct
  source 1..10: mol_type = other RNA
  misc_feature 1..10: note = Description of sequence: Splice site sequence
cgtgtatgca

SEQ ID NO: 1657 - RNA, 10 nt, synthetic construct
  source 1..10: mol_type = other RNA
  misc_feature 1..10: note = Description of sequence: Splice site sequence
cgtgtatgta

SEQ ID NO: 1658 - RNA, 10 nt, synthetic construct
  source 1..10: mol_type = other RNA
  misc_feature 1..10: note = Description of sequence: Splice site sequence
cgtgtctgta

SEQ ID NO: 1659 - RNA, 10 nt, synthetic construct
  source 1..10: mol_type = other RNA
  misc_feature 1..10: note = Description of sequence: Splice site sequence
cgtgtgagtg

SEQ ID NO: 1660 - RNA, 10 nt, synthetic construct
  source 1..10: mol_type = other RNA
  misc_feature 1..10: note = Description of sequence: Splice site sequence
cgtgttttct

SEQ ID NO: 1661 - RNA, 10 nt, synthetic construct
  source 1..10: mol_type = other RNA
  misc_feature 1..10: note = Description of sequence: Splice site sequence
ctagtaaatg

SEQ ID NO: 1662 - RNA, 10 nt, synthetic construct
  source 1..10: mol_type = other RNA
  misc_feature 1..10: note = Description of sequence: Splice site sequence
ctagtaagcg

SEQ ID NO: 1663 - RNA, 10 nt, synthetic construct
  source 1..10: mol_type = other RNA
  misc_feature 1..10: note = Description of sequence: Splice site sequence
ctagtaagct

SEQ ID NO: 1664 - RNA, 10 nt, synthetic construct
  source 1..10: mol_type = other RNA
  misc_feature 1..10: note = Description of sequence: Splice site sequence
ctagtaagta

SEQ ID NO: 1665 - RNA, 10 nt, synthetic construct
  source 1..10: mol_type = other RNA
  misc_feature 1..10: note = Description of sequence: Splice site sequence
ctagtaagtc

SEQ ID NO: 1666 - RNA, 10 nt, synthetic construct
  source 1..10: mol_type = other RNA
  misc_feature 1..10: note = Description of sequence: Splice site sequence
ctagtaagtg

SEQ ID NO: 1667 - RNA, 10 nt, synthetic construct
  source 1..10: mol_type = other RNA
  misc_feature 1..10: note = Description of sequence: Splice site sequence
ctagtaagtt

SEQ ID NO: 1668 - RNA, 10 nt, synthetic construct
  source 1..10: mol_type = other RNA
  misc_feature 1..10: note = Description of sequence: Splice site sequence
ctagtaattt

SEQ ID NO: 1669 - RNA, 10 nt, synthetic construct
  source 1..10: mol_type = other RNA
  misc_feature 1..10: note = Description of sequence: Splice site sequence
ctagtaggta

SEQ ID NO: 1670 - RNA, 10 nt, synthetic construct
  source 1..10: mol_type = other RNA
  misc_feature 1..10: note = Description of sequence: Splice site sequence
ctagtaggtt

SEQ ID NO: 1671 - RNA, 10 nt, synthetic construct
  source 1..10: mol_type = other RNA
  misc_feature 1..10: note = Description of sequence: Splice site sequence
ctagtatgta

SEQ ID NO: 1672 - RNA, 10 nt, synthetic construct
  source 1..10: mol_type = other RNA
  misc_feature 1..10: note = Description of sequence: Splice site sequence
ctagtatgtt

SEQ ID NO: 1673 - RNA, 10 nt, synthetic construct
  source 1..10: mol_type = other RNA
  misc_feature 1..10: note = Description of sequence: Splice site sequence
ctagtgagta

SEQ ID NO: 1674 - RNA, 10 nt, synthetic construct
  source 1..10: mol_type = other RNA
  misc_feature 1..10: note = Description of sequence: Splice site sequence
ctcgtaagca

SEQ ID NO: 1675 - RNA, 10 nt, synthetic construct
  source 1..10: mol_type = other RNA
  misc_feature 1..10: note = Description of sequence: Splice site sequence
ctcgtaagtg

SEQ ID NO: 1676 - RNA, 10 nt, synthetic construct
  source 1..10: mol_type = other RNA
  misc_feature 1..10: note = Description of sequence: Splice site sequence
ctcgtaagtt

SEQ ID NO: 1677 - RNA, 10 nt, synthetic construct
  source 1..10: mol_type = other RNA
  misc_feature 1..10: note = Description of sequence: Splice site sequence
ctcgtatctg

SEQ ID NO: 1678 - RNA, 10 nt, synthetic construct
  source 1..10: mol_type = other RNA
  misc_feature 1..10: note = Description of sequence: Splice site sequence
ctcgtctgtg

SEQ ID NO: 1679 - RNA, 10 nt, synthetic construct
  source 1..10: mol_type = other RNA
  misc_feature 1..10: note = Description of sequence: Splice site sequence
ctcgtgaata

SEQ ID NO: 1680 - RNA, 10 nt, synthetic construct
  source 1..10: mol_type = other RNA
  misc_feature 1..10: note = Description of sequence: Splice site sequence
ctcgtgagta

SEQ ID NO: 1681 - RNA, 10 nt, synthetic construct
  source 1..10: mol_type = other RNA
  misc_feature 1..10: note = Description of sequence: Splice site sequence
ctcgtgatta

SEQ ID NO: 1682 - RNA, 10 nt, synthetic construct
  source 1..10: mol_type = other RNA
  misc_feature 1..10: note = Description of sequence: Splice site sequence
ctggtaaaaa

SEQ ID NO: 1683 - RNA, 10 nt, synthetic construct
  source 1..10: mol_type = other RNA
  misc_feature 1..10: note = Description of sequence: Splice site sequence
ctggtaaaat

SEQ ID NO: 1684 - RNA, 10 nt, synthetic construct
  source 1..10: mol_type = other RNA
  misc_feature 1..10: note = Description of sequence: Splice site sequence
ctggtaaacc

SEQ ID NO: 1685 - RNA, 10 nt, synthetic construct
  source 1..10: mol_type = other RNA
  misc_feature 1..10: note = Description of sequence: Splice site sequence
ctggtaaacg

SEQ ID NO: 1686 - RNA, 10 nt, synthetic construct
  source 1..10: mol_type = other RNA
  misc_feature 1..10: note = Description of sequence: Splice site sequence
ctggtaaagc

SEQ ID NO: 1687 - RNA, 10 nt, synthetic construct
  source 1..10: mol_type = other RNA
  misc_feature 1..10: note = Description of sequence: Splice site sequence
ctggtaaata

SEQ ID NO: 1688 - RNA, 10 nt, synthetic construct
  source 1..10: mol_type = other RNA
  misc_feature 1..10: note = Description of sequence: Splice site sequence
ctggtaaatc

SEQ ID NO: 1689 - RNA, 10 nt, synthetic construct
  source 1..10: mol_type = other RNA
  misc_feature 1..10: note = Description of sequence: Splice site sequence
ctggtaaatg

SEQ ID NO: 1690 - RNA, 10 nt, synthetic construct
  source 1..10: mol_type = other RNA
  misc_feature 1..10: note = Description of sequence: Splice site sequence
ctggtaaatt

SEQ ID NO: 1691 - RNA, 10 nt, synthetic construct
  source 1..10: mol_type = other RNA
  misc_feature 1..10: note = Description of sequence: Splice site sequence
ctggtaacac

SEQ ID NO: 1692 - RNA, 10 nt, synthetic construct
  source 1..10: mol_type = other RNA
  misc_feature 1..10: note = Description of sequence: Splice site sequence
ctggtaacag

SEQ ID NO: 1693 - RNA, 10 nt, synthetic construct
  source 1..10: mol_type = other RNA
  misc_feature 1..10: note = Description of sequence: Splice site sequence
ctggtaaccc

SEQ ID NO: 1694 - RNA, 10 nt, synthetic construct
  source 1..10: mol_type = other RNA
  misc_feature 1..10: note = Description of sequence: Splice site sequence
ctggtaaccg

SEQ ID NO: 1695 - RNA, 10 nt, synthetic construct
  source 1..10: mol_type = other RNA
  misc_feature 1..10: note = Description of sequence: Splice site sequence
ctggtaactg

SEQ ID NO: 1696 - RNA, 10 nt, synthetic construct
  source 1..10: mol_type = other RNA
  misc_feature 1..10: note = Description of sequence: Splice site sequence
ctggtaactt

SEQ ID NO: 1697 - RNA, 10 nt, synthetic construct
  source 1..10: mol_type = other RNA
  misc_feature 1..10: note = Description of sequence: Splice site sequence
ctggtaagaa

SEQ ID NO: 1698 - RNA, 10 nt, synthetic construct
  source 1..10: mol_type = other RNA
  misc_feature 1..10: note = Description of sequence: Splice site sequence
ctggtaagag

SEQ ID NO: 1699 - RNA, 10 nt, synthetic construct
  source 1..10: mol_type = other RNA
  misc_feature 1..10: note = Description of sequence: Splice site sequence
ctggtaagat

SEQ ID NO: 1700 - RNA, 10 nt, synthetic construct
  source 1..10: mol_type = other RNA
  misc_feature 1..10: note = Description of sequence: Splice site sequence
ctggtaagca

SEQ ID NO: 1701 - RNA, 10 nt, synthetic construct
  source 1..10: mol_type = other RNA
  misc_feature 1..10: note = Description of sequence: Splice site sequence
ctggtaagcc

SEQ ID NO: 1702 - RNA, 10 nt, synthetic construct
  source 1..10: mol_type = other RNA
  misc_feature 1..10: note = Description of sequence: Splice site sequence
ctggtaagct

SEQ ID NO: 1703 - RNA, 10 nt, synthetic construct
  source 1..10: mol_type = other RNA
  misc_feature 1..10: note = Description of sequence: Splice site sequence
ctggtaagga

SEQ ID NO: 1704 - RNA, 10 nt, synthetic construct
  source 1..10: mol_type = other RNA
  misc_feature 1..10: note = Description of sequence: Splice site sequence
ctggtaaggc

SEQ ID NO: 1705 - RNA, 10 nt, synthetic construct
  source 1..10: mol_type = other RNA
  misc_feature 1..10: note = Description of sequence: Splice site sequence
ctggtaaggg

SEQ ID NO: 1706 - RNA, 10 nt, synthetic construct
  source 1..10: mol_type = other RNA
  misc_feature 1..10: note = Description of sequence: Splice site sequence
ctggtaaggt

SEQ ID NO: 1707 - RNA, 10 nt, synthetic construct
  source 1..10: mol_type = other RNA
  misc_feature 1..10: note = Description of sequence: Splice site sequence
ctggtaagta

SEQ ID NO: 1708 - RNA, 10 nt, synthetic construct
  source 1..10: mol_type = other RNA
  misc_feature 1..10: note = Description of sequence: Splice site sequence
ctggtaagtg

SEQ ID NO: 1709 - RNA, 10 nt, synthetic construct
  source 1..10: mol_type = other RNA
  misc_feature 1..10: note = Description of sequence: Splice site sequence
ctggtaagtt

SEQ ID NO: 1710 - RNA, 10 nt, synthetic construct
  source 1..10: mol_type = other RNA
  misc_feature 1..10: note = Description of sequence: Splice site sequence
ctggtaatga

SEQ ID NO: 1711 - RNA, 10 nt, synthetic construct
  source 1..10: mol_type = other RNA
  misc_feature 1..10: note = Description of sequence: Splice site sequence
ctggtaatgc

SEQ ID NO: 1712 - RNA, 10 nt, synthetic construct
  source 1..10: mol_type = other RNA
  misc_feature 1..10: note = Description of sequence: Splice site sequence
ctggtaattc

SEQ ID NO: 1713 - RNA, 10 nt, synthetic construct
  source 1..10: mol_type = other RNA
  misc_feature 1..10: note = Description of sequence: Splice site sequence
ctggtaattt

SEQ ID NO: 1714 - RNA, 10 nt, synthetic construct
  source 1..10: mol_type = other RNA
  misc_feature 1..10: note = Description of sequence: Splice site sequence
ctggtacaac

SEQ ID NO: 1715 - RNA, 10 nt, synthetic construct
  source 1..10: mol_type = other RNA
  misc_feature 1..10: note = Description of sequence: Splice site sequence
ctggtacaat

SEQ ID NO: 1716 - RNA, 10 nt, synthetic construct
  source 1..10: mol_type = other RNA
  misc_feature 1..10: note = Description of sequence: Splice site sequence
ctggtacaga

SEQ ID NO: 1717 - RNA, 10 nt, synthetic construct
  source 1..10: mol_type = other RNA
  misc_feature 1..10: note = Description of sequence: Splice site sequence
ctggtacata

SEQ ID NO: 1718 - RNA, 10 nt, synthetic construct
  source 1..10: mol_type = other RNA
  misc_feature 1..10: note = Description of sequence: Splice site sequence
ctggtacatt

SEQ ID NO: 1719 - RNA, 10 nt, synthetic construct
  source 1..10: mol_type = other RNA
  misc_feature 1..10: note = Description of sequence: Splice site sequence
ctggtaccat

SEQ ID NO: 1720 - RNA, 10 nt, synthetic construct
  source 1..10: mol_type = other RNA
  misc_feature 1..10: note = Description of sequence: Splice site sequence
ctggtacgtt

SEQ ID NO: 1721 - RNA, 10 nt, synthetic construct
  source 1..10: mol_type = other RNA
  misc_feature 1..10: note = Description of sequence: Splice site sequence
ctggtactaa

SEQ ID NO: 1722 - RNA, 10 nt, synthetic construct
  source 1..10: mol_type = other RNA
  misc_feature 1..10: note = Description of sequence: Splice site sequence
ctggtacttg

SEQ ID NO: 1723 - RNA, 10 nt, synthetic construct
  source 1..10: mol_type = other RNA
  misc_feature 1..10: note = Description of sequence: Splice site sequence
ctggtacttt

SEQ ID NO: 1724 - RNA, 10 nt, synthetic construct
  source 1..10: mol_type = other RNA
  misc_feature 1..10: note = Description of sequence: Splice site sequence
ctggtagaga

SEQ ID NO: 1725 - RNA, 10 nt, synthetic construct
  source 1..10: mol_type = other RNA
  misc_feature 1..10: note = Description of sequence: Splice site sequence
ctggtagata

SEQ ID NO: 1726 - RNA, 10 nt, synthetic construct
  source 1..10: mol_type = other RNA
  misc_feature 1..10: note = Description of sequence: Splice site sequence
ctggtagcgt

SEQ ID NO: 1727 - RNA, 10 nt, synthetic construct
  source 1..10: mol_type = other RNA
  misc_feature 1..10: note = Description of sequence: Splice site sequence
ctggtaggat

SEQ ID NO: 1728 - RNA, 10 nt, synthetic construct
  source 1..10: mol_type = other RNA
  misc_feature 1..10: note = Description of sequence: Splice site sequence
ctggtaggca

SEQ ID NO: 1729 - RNA, 10 nt, synthetic construct
  source 1..10: mol_type = other RNA
  misc_feature 1..10: note = Description of sequence: Splice site sequence
ctggtaggta

SEQ ID NO: 1730 - RNA, 10 nt, synthetic construct
  source 1..10: mol_type = other RNA
  misc_feature 1..10: note = Description of sequence: Splice site sequence
ctggtaggtc

SEQ ID NO: 1731 - RNA, 10 nt, synthetic construct
  source 1..10: mol_type = other RNA
  misc_feature 1..10: note = Description of sequence: Splice site sequence
ctggtaggtg

SEQ ID NO: 1732 - RNA, 10 nt, synthetic construct
  source 1..10: mol_type = other RNA
  misc_feature 1..10: note = Description of sequence: Splice site sequence
ctggtatcaa

SEQ ID NO: 1733 - RNA, 10 nt, synthetic construct
  source 1..10: mol_type = other RNA
  misc_feature 1..10: note = Description of sequence: Splice site sequence
ctggtatgat

SEQ ID NO: 1734 - RNA, 10 nt, synthetic construct
  source 1..10: mol_type = other RNA
  misc_feature 1..10: note = Description of sequence: Splice site sequence
ctggtatggc

SEQ ID NO: 1735 - RNA, 10 nt, synthetic construct
  source 1..10: mol_type = other RNA
  misc_feature 1..10: note = Description of sequence: Splice site sequence
ctggtatggt

SEQ ID NO: 1736 - RNA, 10 nt, synthetic construct
  source 1..10: mol_type = other RNA
  misc_feature 1..10: note = Description of sequence: Splice site sequence
ctggtatgta

SEQ ID NO: 1737 - RNA, 10 nt, synthetic construct
  source 1..10: mol_type = other RNA
  misc_feature 1..10: note = Description of sequence: Splice site sequence
ctggtatgtg

SEQ ID NO: 1738 - RNA, 10 nt, synthetic construct
  source 1..10: mol_type = other RNA
  misc_feature 1..10: note = Description of sequence: Splice site sequence
ctggtatgtt

SEQ ID NO: 1739 - RNA, 10 nt, synthetic construct
  source 1..10: mol_type = other RNA
  misc_feature 1..10: note = Description of sequence: Splice site sequence
ctggtattga

SEQ ID NO: 1740 - RNA, 10 nt, synthetic construct
  source 1..10: mol_type = other RNA
  misc_feature 1..10: note = Description of sequence: Splice site sequence
ctggtatttc

SEQ ID NO: 1741 - RNA, 10 nt, synthetic construct
  source 1..10: mol_type = other RNA
  misc_feature 1..10: note = Description of sequence: Splice site sequence
ctggtatttt

SEQ ID NO: 1742 - RNA, 10 nt, synthetic construct
  source 1..10: mol_type = other RNA
  misc_feature 1..10: note = Description of sequence: Splice site sequence
ctggtcaaca

SEQ ID NO: 1743 - RNA, 10 nt, synthetic construct
  source 1..10: mol_type = other RNA
  misc_feature 1..10: note = Description of sequence: Splice site sequence
ctggtcagag

SEQ ID NO: 1744 - RNA, 10 nt, synthetic construct
  source 1..10: mol_type = other RNA
  misc_feature 1..10: note = Description of sequence: Splice site sequence
ctggtcccgc

SEQ ID NO: 1745 - RNA, 10 nt, synthetic construct
  source 1..10: mol_type = other RNA
  misc_feature 1..10: note = Description of sequence: Splice site sequence
ctggtcggta

SEQ ID NO: 1746 - RNA, 10 nt, synthetic construct
  source 1..10: mol_type = other RNA
  misc_feature 1..10: note = Description of sequence: Splice site sequence
ctggtctggg

SEQ ID NO: 1747 - RNA, 10 nt, synthetic construct
  source 1..10: mol_type = other RNA
  misc_feature 1..10: note = Description of sequence: Splice site sequence
ctggtgaagt

SEQ ID NO: 1748 - RNA, 10 nt, synthetic construct
  source 1..10: mol_type = other RNA
  misc_feature 1..10: note = Description of sequence: Splice site sequence
ctggtgaata

SEQ ID NO: 1749 - RNA, 10 nt, synthetic construct
  source 1..10: mol_type = other RNA
  misc_feature 1..10: note = Description of sequence: Splice site sequence
ctggtgaatt

SEQ ID NO: 1750 - RNA, 10 nt, synthetic construct
  source 1..10: mol_type = other RNA
  misc_feature 1..10: note = Description of sequence: Splice site sequence
ctggtgacta

SEQ ID NO: 1751 - RNA, 10 nt, synthetic construct
  source 1..10: mol_type = other RNA
  misc_feature 1..10: note = Description of sequence: Splice site sequence
ctggtgagaa

SEQ ID NO: 1752 - RNA, 10 nt, synthetic construct
  source 1..10: mol_type = other RNA
  misc_feature 1..10: note = Description of sequence: Splice site sequence
ctggtgagac

SEQ ID NO: 1753 - RNA, 10 nt, synthetic construct
  source 1..10: mol_type = other RNA
  misc_feature 1..10: note = Description of sequence: Splice site sequence
ctggtgagca

SEQ ID NO: 1754 - RNA, 10 nt, synthetic construct
  source 1..10: mol_type = other RNA
  misc_feature 1..10: note = Description of sequence: Splice site sequence
ctggtgagct

SEQ ID NO: 1755 - RNA, 10 nt, synthetic construct
  source 1..10: mol_type = other RNA
  misc_feature 1..10: note = Description of sequence: Splice site sequence
ctggtgagga

SEQ ID NO: 1756 - RNA, 10 nt, synthetic construct
  source 1..10: mol_type = other RNA
  misc_feature 1..10: note = Description of sequence: Splice site sequence
ctggtgaggc

SEQ ID NO: 1757 - RNA, 10 nt, synthetic construct
  source 1..10: mol_type = other RNA
  misc_feature 1..10: note = Description of sequence: Splice site sequence
ctggtgaggg

SEQ ID NO: 1758 - RNA, 10 nt, synthetic construct
  source 1..10: mol_type = other RNA
  misc_feature 1..10: note = Description of sequence: Splice site sequence
ctggtgaggt

SEQ ID NO: 1759 - RNA, 10 nt, synthetic construct
  source 1..10: mol_type = other RNA
  misc_feature 1..10: note = Description of sequence: Splice site sequence
ctggtgagta

SEQ ID NO: 1760 - RNA, 10 nt, synthetic construct
  source 1..10: mol_type = other RNA
  misc_feature 1..10: note = Description of sequence: Splice site sequence
ctggtgagtc

SEQ ID NO: 1761 - RNA, 10 nt, synthetic construct
  source 1..10: mol_type = other RNA
  misc_feature 1..10: note = Description of sequence: Splice site sequence
ctggtgagtg

SEQ ID NO: 1762 - RNA, 10 nt, synthetic construct
  source 1..10: mol_type = other RNA
  misc_feature 1..10: note = Description of sequence: Splice site sequence
ctggtgagtt

SEQ ID NO: 1763 - RNA, 10 nt, synthetic construct
  source 1..10: mol_type = other RNA
  misc_feature 1..10: note = Description of sequence: Splice site sequence
ctggtgatta

SEQ ID NO: 1764 - RNA, 10 nt, synthetic construct
  source 1..10: mol_type = other RNA
  misc_feature 1..10: note = Description of sequence: Splice site sequence
ctggtgattt

SEQ ID NO: 1765 - RNA, 10 nt, synthetic construct
  source 1..10: mol_type = other RNA
  misc_feature 1..10: note = Description of sequence: Splice site sequence
ctggtgcaga

SEQ ID NO: 1766 - RNA, 10 nt, synthetic construct
  source 1..10: mol_type = other RNA
  misc_feature 1..10: note = Description of sequence: Splice site sequence
ctggtgcgct

SEQ ID NO: 1767 - RNA, 10 nt, synthetic construct
  source 1..10: mol_type = other RNA
  misc_feature 1..10: note = Description of sequence: Splice site sequence
ctggtgcgtg

SEQ ID NO: 1768 - RNA, 10 nt, synthetic construct
  source 1..10: mol_type = other RNA
  misc_feature 1..10: note = Description of sequence: Splice site sequence
ctggtgctga

SEQ ID NO: 1769 - RNA, 10 nt, synthetic construct
  source 1..10: mol_type = other RNA
  misc_feature 1..10: note = Description of sequence: Splice site sequence
ctggtgggag

SEQ ID NO: 1770 - RNA, 10 nt, synthetic construct
  source 1..10: mol_type = other RNA
  misc_feature 1..10: note = Description of sequence: Splice site sequence
ctggtgggga

SEQ ID NO: 1771 - RNA, 10 nt, synthetic construct
  source 1..10: mol_type = other RNA
  misc_feature 1..10: note = Description of sequence: Splice site sequence
ctggtgggta

SEQ ID NO: 1772 - RNA, 10 nt, synthetic construct
  source 1..10: mol_type = other RNA
  misc_feature 1..10: note = Description of sequence: Splice site sequence
ctggtgggtc

SEQ ID NO: 1773 - RNA, 10 nt, synthetic construct
  source 1..10: mol_type = other RNA
  misc_feature 1..10: note = Description of sequence: Splice site sequence
ctggtgggtg

SEQ ID NO: 1774 - RNA, 10 nt, synthetic construct
  source 1..10: mol_type = other RNA
  misc_feature 1..10: note = Description of sequence: Splice site sequence
ctggtgggtt

SEQ ID NO: 1775 - RNA, 10 nt, synthetic construct
  source 1..10: mol_type = other RNA
  misc_feature 1..10: note = Description of sequence: Splice site sequence
ctggtgtgaa

SEQ ID NO: 1776 - RNA, 10 nt, synthetic construct
  source 1..10: mol_type = other RNA
  misc_feature 1..10: note = Description of sequence: Splice site sequence
ctggtgtgca

SEQ ID NO: 1777 - RNA, 10 nt, synthetic construct
  source 1..10: mol_type = other RNA
  misc_feature 1..10: note = Description of sequence: Splice site sequence
ctggtgtgct

SEQ ID NO: 1778 - RNA, 10 nt, synthetic construct
  source 1..10: mol_type = other RNA
  misc_feature 1..10: note = Description of sequence: Splice site sequence
ctggtgtggt

SEQ ID NO: 1779 - RNA, 10 nt, synthetic construct
  source 1..10: mol_type = other RNA
  misc_feature 1..10: note = Description of sequence: Splice site sequence
ctggtgtgtg

SEQ ID NO: 1780 - RNA, 10 nt, synthetic construct
  source 1..10: mol_type = other RNA
  misc_feature 1..10: note = Description of sequence: Splice site sequence
ctggtgtgtt

SEQ ID NO: 1781 - RNA, 10 nt, synthetic construct
  source 1..10: mol_type = other RNA
  misc_feature 1..10: note = Description of sequence: Splice site sequence
ctggttagct

SEQ ID NO: 1782 - RNA, 10 nt, synthetic construct
  source 1..10: mol_type = other RNA
  misc_feature 1..10: note = Description of sequence: Splice site sequence
ctggttagtg

SEQ ID NO: 1783 - RNA, 10 nt, synthetic construct
  source 1..10: mol_type = other RNA
  misc_feature 1..10: note = Description of sequence: Splice site sequence
ctggttcgtg

SEQ ID NO: 1784 - RNA, 10 nt, synthetic construct
  source 1..10: mol_type = other RNA
  misc_feature 1..10: note = Description of sequence: Splice site sequence
ctggttggct

SEQ ID NO: 1785 - RNA, 10 nt, synthetic construct
  source 1..10: mol_type = other RNA
  misc_feature 1..10: note = Description of sequence: Splice site sequence
ctggttgttt

SEQ ID NO: 1786 - RNA, 10 nt, synthetic construct
  source 1..10: mol_type = other RNA
  misc_feature 1..10: note = Description of sequence: Splice site sequence
ctggtttgta

SEQ ID NO: 1787 - RNA, 10 nt, synthetic construct
  source 1..10: mol_type = other RNA
  misc_feature 1..10: note = Description of sequence: Splice site sequence
ctggtttgtc

SEQ ID NO: 1788 - RNA, 10 nt, synthetic construct
  source 1..10: mol_type = other RNA
  misc_feature 1..10: note = Description of sequence: Splice site sequence
ctggtttgtg

SEQ ID NO: 1789 - RNA, 10 nt, synthetic construct
  source 1..10: mol_type = other RNA
  misc_feature 1..10: note = Description of sequence: Splice site sequence
cttgtaaatg

SEQ ID NO: 1790 - RNA, 10 nt, synthetic construct
  source 1..10: mol_type = other RNA
  misc_feature 1..10: note = Description of sequence: Splice site sequence
cttgtaagct

SEQ ID NO: 1791 - RNA, 10 nt, synthetic construct
  source 1..10: mol_type = other RNA
  misc_feature 1..10: note = Description of sequence: Splice site sequence
cttgtaagga

SEQ ID NO: 1792 - RNA, 10 nt, synthetic construct
  source 1..10: mol_type = other RNA
  misc_feature 1..10: note = Description of sequence: Splice site sequence
cttgtaaggc

SEQ ID NO: 1793 - RNA, 10 nt, synthetic construct
  source 1..10: mol_type = other RNA
  misc_feature 1..10: note = Description of sequence: Splice site sequence
cttgtaagta

SEQ ID NO: 1794 - RNA, 10 nt, synthetic construct
  source 1..10: mol_type = other RNA
  misc_feature 1..10: note = Description of sequence: Splice site sequence
cttgtaagtg

SEQ ID NO: 1795 - RNA, 10 nt, synthetic construct
  source 1..10: mol_type = other RNA
  misc_feature 1..10: note = Description of sequence: Splice site sequence
cttgtaagtt

SEQ ID NO: 1796 - RNA, 10 nt, synthetic construct
  source 1..10: mol_type = other RNA
  misc_feature 1..10: note = Description of sequence: Splice site sequence
cttgtacgtc

SEQ ID NO: 1797 - RNA, 10 nt, synthetic construct
  source 1..10: mol_type = other RNA
  misc_feature 1..10: note = Description of sequence: Splice site sequence
cttgtacgtg

SEQ ID NO: 1798 - RNA, 10 nt, synthetic construct
  source 1..10: mol_type = other RNA
  misc_feature 1..10: note = Description of sequence: Splice site sequence
cttgtaggta

SEQ ID NO: 1799 - RNA, 10 nt, synthetic construct
  source 1..10: mol_type = other RNA
  misc_feature 1..10: note = Description of sequence: Splice site sequence
cttgtagtgc

SEQ ID NO: 1800 - RNA, 10 nt, synthetic construct
  source 1..10: mol_type = other RNA
  misc_feature 1..10: note = Description of sequence: Splice site sequence
cttgtatagg

SEQ ID NO: 1801 - RNA, 10 nt, synthetic construct
  source 1..10: mol_type = other RNA
  misc_feature 1..10: note = Description of sequence: Splice site sequence
cttgtcagta

SEQ ID NO: 1802 - RNA, 10 nt, synthetic construct
  source 1..10: mol_type = other RNA
  misc_feature 1..10: note = Description of sequence: Splice site sequence
cttgtgagta

SEQ ID NO: 1803 - RNA, 10 nt, synthetic construct
  source 1..10: mol_type = other RNA
  misc_feature 1..10: note = Description of sequence: Splice site sequence
cttgtgagtc

SEQ ID NO: 1804 - RNA, 10 nt, synthetic construct
  source 1..10: mol_type = other RNA
  misc_feature 1..10: note = Description of sequence: Splice site sequence
cttgtgagtt

SEQ ID NO: 1805 - RNA, 10 nt, synthetic construct
  source 1..10: mol_type = other RNA
  misc_feature 1..10: note = Description of sequence: Splice site sequence
cttgtgggtt

SEQ ID NO: 1806 - RNA, 10 nt, synthetic construct
  source 1..10: mol_type = other RNA
  misc_feature 1..10: note = Description of sequence: Splice site sequence
cttgtgtgta

SEQ ID NO: 1807 - RNA, 10 nt, synthetic construct
  source 1..10: mol_type = other RNA
  misc_feature 1..10: note = Description of sequence: Splice site sequence
cttgttagtg

SEQ ID NO: 1808 - RNA, 10 nt, synthetic construct
  source 1..10: mol_type = other RNA
  misc_feature 1..10: note = Description of sequence: Splice site sequence
cttgtttgag

SEQ ID NO: 1809 - RNA, 10 nt, synthetic construct
  source 1..10: mol_type = other RNA
  misc_feature 1..10: note = Description of sequence: Splice site sequence
gaagtaaaac

SEQ ID NO: 1810 - RNA, 10 nt, synthetic construct
  source 1..10: mol_type = other RNA
  misc_feature 1..10: note = Description of sequence: Splice site sequence
gaagtaaagc

SEQ ID NO: 1811 - RNA, 10 nt, synthetic construct
  source 1..10: mol_type = other RNA
  misc_feature 1..10: note = Description of sequence: Splice site sequence
gaagtaaagt

SEQ ID NO: 1812 - RNA, 10 nt, synthetic construct
  source 1..10: mol_type = other RNA
  misc_feature 1..10: note = Description of sequence: Splice site sequence
gaagtaaata

SEQ ID NO: 1813 - RNA, 10 nt, synthetic construct
  source 1..10: mol_type = other RNA
  misc_feature 1..10: note = Description of sequence: Splice site sequence
gaagtaaatt

SEQ ID NO: 1814 - RNA, 10 nt, synthetic construct
  source 1..10: mol_type = other RNA
  misc_feature 1..10: note = Description of sequence: Splice site sequence
gaagtaagaa

SEQ ID NO: 1815 - RNA, 10 nt, synthetic construct
  source 1..10: mol_type = other RNA
  misc_feature 1..10: note = Description of sequence: Splice site sequence
gaagtaagcc

SEQ ID NO: 1816 - RNA, 10 nt, synthetic construct
  source 1..10: mol_type = other RNA
  misc_feature 1..10: note = Description of sequence: Splice site sequence
gaagtaagct

SEQ ID NO: 1817 - RNA, 10 nt, synthetic construct
  source 1..10: mol_type = other RNA
  misc_feature 1..10: note = Description of sequence: Splice site sequence
gaagtaagga

SEQ ID NO: 1818 - RNA, 10 nt, synthetic construct
  source 1..10: mol_type = other RNA
  misc_feature 1..10: note = Description of sequence: Splice site sequence
gaagtaagta

SEQ ID NO: 1819 - RNA, 10 nt, synthetic construct
  source 1..10: mol_type = other RNA
  misc_feature 1..10: note = Description of sequence: Splice site sequence
gaagtaagtg

SEQ ID NO: 1820 - RNA, 10 nt, synthetic construct
  source 1..10: mol_type = other RNA
  misc_feature 1..10: note = Description of sequence: Splice site sequence
gaagtaagtt

SEQ ID NO: 1821 - RNA, 10 nt, synthetic construct
  source 1..10: mol_type = other RNA
  misc_feature 1..10: note = Description of sequence: Splice site sequence
gaagtaatat

SEQ ID NO: 1822 - RNA, 10 nt, synthetic construct
  source 1..10: mol_type = other RNA
  misc_feature 1..10: note = Description of sequence: Splice site sequence
gaagtaatgc

SEQ ID NO: 1823 - RNA, 10 nt, synthetic construct
  source 1..10: mol_type = other RNA
  misc_feature 1..10: note = Description of sequence: Splice site sequence
gaagtaatta

SEQ ID NO: 1824 - RNA, 10 nt, synthetic construct
  source 1..10: mol_type = other RNA
  misc_feature 1..10: note = Description of sequence: Splice site sequence
gaagtaattt

SEQ ID NO: 1825 - RNA, 10 nt, synthetic construct
  source 1..10: mol_type = other RNA
  misc_feature 1..10: note = Description of sequence: Splice site sequence
gaagtaccat

SEQ ID NO: 1826 - RNA, 10 nt, synthetic construct
  source 1..10: mol_type = other RNA
  misc_feature 1..10: note = Description of sequence: Splice site sequence
gaagtacgta

SEQ ID NO: 1827 - RNA, 10 nt, synthetic construct
  source 1..10: mol_type = other RNA
  misc_feature 1..10: note = Description of sequence: Splice site sequence
gaagtacgtc

SEQ ID NO: 1828 - RNA, 10 nt, synthetic construct
  source 1..10: mol_type = other RNA
  misc_feature 1..10: note = Description of sequence: Splice site sequence
gaagtaggca

SEQ ID NO: 1829 - RNA, 10 nt, synthetic construct
  source 1..10: mol_type = other RNA
  misc_feature 1..10: note = Description of sequence: Splice site sequence
gaagtaggtc

SEQ ID NO: 1830 - RNA, 10 nt, synthetic construct
  source 1..10: mol_type = other RNA
  misc_feature 1..10: note = Description of sequence: Splice site sequence
gaagtataaa

SEQ ID NO: 1831 - RNA, 10 nt, synthetic construct
  source 1..10: mol_type = other RNA
  misc_feature 1..10: note = Description of sequence: Splice site sequence
gaagtatgct

SEQ ID NO: 1832 - RNA, 10 nt, synthetic construct
  source 1..10: mol_type = other RNA
  misc_feature 1..10: note = Description of sequence: Splice site sequence
gaagtatgtg

SEQ ID NO: 1833 - RNA, 10 nt, synthetic construct
  source 1..10: mol_type = other RNA
  misc_feature 1..10: note = Description of sequence: Splice site sequence
gaagtatgtt

SEQ ID NO: 1834 - RNA, 10 nt, synthetic construct
  source 1..10: mol_type = other RNA
  misc_feature 1..10: note = Description of sequence: Splice site sequence
gaagtattaa

SEQ ID NO: 1835 - RNA, 10 nt, synthetic construct
  source 1..10: mol_type = other RNA
  misc_feature 1..10: note = Description of sequence: Splice site sequence
gaagtcagtg

SEQ ID NO: 1836 - RNA, 10 nt, synthetic construct
  source 1..10: mol_type = other RNA
  misc_feature 1..10: note = Description of sequence: Splice site sequence
gaagtgagag

SEQ ID NO: 1837 - RNA, 10 nt, synthetic construct
  source 1..10: mol_type = other RNA
  misc_feature 1..10: note = Description of sequence: Splice site sequence
gaagtgagcg

SEQ ID NO: 1838 - RNA, 10 nt, synthetic construct
  source 1..10: mol_type = other RNA
  misc_feature 1..10: note = Description of sequence: Splice site sequence
gaagtgaggt

SEQ ID NO: 1839 - RNA, 10 nt, synthetic construct
  source 1..10: mol_type = other RNA
  misc_feature 1..10: note = Description of sequence: Splice site sequence
gaagtgagtc

SEQ ID NO: 1840 - RNA, 10 nt, synthetic construct
  source 1..10: mol_type = other RNA
  misc_feature 1..10: note = Description of sequence: Splice site sequence
gaagtgagtg

SEQ ID NO: 1841 - RNA, 10 nt, synthetic construct
  source 1..10: mol_type = other RNA
  misc_feature 1..10: note = Description of sequence: Splice site sequence
gaagtgagtt

SEQ ID NO: 1842 - RNA, 10 nt, synthetic construct
  source 1..10: mol_type = other RNA
  misc_feature 1..10: note = Description of sequence: Splice site sequence
gaagtgataa

SEQ ID NO: 1843 - RNA, 10 nt, synthetic construct
  source 1..10: mol_type = other RNA
  misc_feature 1..10: note = Description of sequence: Splice site sequence
gaagtgattc

SEQ ID NO: 1844 - RNA, 10 nt, synthetic construct
  source 1..10: mol_type = other RNA
  misc_feature 1..10: note = Description of sequence: Splice site sequence
gaagtgcgtg

SEQ ID NO: 1845 - RNA, 10 nt, synthetic construct
  source 1..10: mol_type = other RNA
  misc_feature 1..10: note = Description of sequence: Splice site sequence
gaagtgtggg

SEQ ID NO: 1846 - RNA, 10 nt, synthetic construct
  source 1..10: mol_type = other RNA
  misc_feature 1..10: note = Description of sequence: Splice site sequence
gaagtgtgtc

SEQ ID NO: 1847 - RNA, 10 nt, synthetic construct
  source 1..10: mol_type = other RNA
  misc_feature 1..10: note = Description of sequence: Splice site sequence
gaagttggtg

SEQ ID NO: 1848 - RNA, 10 nt, synthetic construct
  source 1..10: mol_type = other RNA
  misc_feature 1..10: note = Description of sequence: Splice site sequence
gacgtaaagt

SEQ ID NO: 1849 - RNA, 10 nt, synthetic construct
  source 1..10: mol_type = other RNA
  misc_feature 1..10: note = Description of sequence: Splice site sequence
gacgtaagct

SEQ ID NO: 1850 - RNA, 10 nt, synthetic construct
  source 1..10: mol_type = other RNA
  misc_feature 1..10: note = Description of sequence: Splice site sequence
gacgtaagta

SEQ ID NO: 1851 - RNA, 10 nt, synthetic construct
  source 1..10: mol_type = other RNA
  misc_feature 1..10: note = Description of sequence: Splice site sequence
gacgtaatgg

SEQ ID NO: 1852 - RNA, 10 nt, synthetic construct
  source 1..10: mol_type = other RNA
  misc_feature 1..10: note = Description of sequence: Splice site sequence
gacgtatgcc

SEQ ID NO: 1853 - RNA, 10 nt, synthetic construct
  source 1..10: mol_type = other RNA
  misc_feature 1..10: note = Description of sequence: Splice site sequence
gacgtatgtt

SEQ ID NO: 1854 - RNA, 10 nt, synthetic construct
  source 1..10: mol_type = other RNA
  misc_feature 1..10: note = Description of sequence: Splice site sequence
gacgtgagcc

SEQ ID NO: 1855 - RNA, 10 nt, synthetic construct
  source 1..10: mol_type = other RNA
  misc_feature 1..10: note = Description of sequence: Splice site sequence
gacgtgagtg

SEQ ID NO: 1856 - RNA, 10 nt, synthetic construct
  source 1..10: mol_type = other RNA
  misc_feature 1..10: note = Description of sequence: Splice site sequence
gaggcaaatg

SEQ ID NO: 1857 - RNA, 10 nt, synthetic construct
  source 1..10: mol_type = other RNA
  misc_feature 1..10: note = Description of sequence: Splice site sequence
gaggcaagag

SEQ ID NO: 1858 - RNA, 10 nt, synthetic construct
  source 1..10: mol_type = other RNA
  misc_feature 1..10: note = Description of sequence: Splice site sequence
gaggcaagta

SEQ ID NO: 1859 - RNA, 10 nt, synthetic construct
  source 1..10: mol_type = other RNA
  misc_feature 1..10: note = Description of sequence: Splice site sequence
gaggcaagtg

SEQ ID NO: 1860 - RNA, 10 nt, synthetic construct
  source 1..10: mol_type = other RNA
  misc_feature 1..10: note = Description of sequence: Splice site sequence
gaggcaagtt

SEQ ID NO: 1861 - RNA, 10 nt, synthetic construct
  source 1..10: mol_type = other RNA
  misc_feature 1..10: note = Description of sequence: Splice site sequence
gaggcacgag

SEQ ID NO: 1862 - RNA, 10 nt, synthetic construct
  source 1..10: mol_type = other RNA
  misc_feature 1..10: note = Description of sequence: Splice site sequence
gaggcaggga

SEQ ID NO: 1863 - RNA, 10 nt, synthetic construct
  source 1..10: mol_type = other RNA
  misc_feature 1..10: note = Description of sequence: Splice site sequence
gaggcatgtg

SEQ ID NO: 1864 - RNA, 10 nt, synthetic construct
  source 1..10: mol_type = other RNA
  misc_feature 1..10: note = Description of sequence: Splice site sequence
gaggcgaagg

SEQ ID NO: 1865 - RNA, 10 nt, synthetic construct
  source 1..10: mol_type = other RNA
  misc_feature 1..10: note = Description of sequence: Splice site sequence
gaggtaaaaa

SEQ ID NO: 1866 - RNA, 10 nt, synthetic construct
  source 1..10: mol_type = other RNA
  misc_feature 1..10: note = Description of sequence: Splice site sequence
gaggtaaaac

SEQ ID NO: 1867 - RNA, 10 nt, synthetic construct
  source 1..10: mol_type = other RNA
  misc_feature 1..10: note = Description of sequence: Splice site sequence
gaggtaaaag

SEQ ID NO: 1868 - RNA, 10 nt, synthetic construct
  source 1..10: mol_type = other RNA
  misc_feature 1..10: note = Description of sequence: Splice site sequence
gaggtaaaat

SEQ ID NO: 1869 - RNA, 10 nt, synthetic construct
  source 1..10: mol_type = other RNA
  misc_feature 1..10: note = Description of sequence: Splice site sequence
gaggtaaacc

SEQ ID NO: 1870 - RNA, 10 nt, synthetic construct
  source 1..10: mol_type = other RNA
  misc_feature 1..10: note = Description of sequence: Splice site sequence
gaggtaaaga

SEQ ID NO: 1871 - RNA, 10 nt, synthetic construct
  source 1..10: mol_type = other RNA
  misc_feature 1..10: note = Description of sequence: Splice site sequence
gaggtaaagc

SEQ ID NO: 1872 - RNA, 10 nt, synthetic construct
  source 1..10: mol_type = other RNA
  misc_feature 1..10: note = Description of sequence: Splice site sequence
gaggtaaagt

SEQ ID NO: 1873 - RNA, 10 nt, synthetic construct
  source 1..10: mol_type = other RNA
  misc_feature 1..10: note = Description of sequence: Splice site sequence
gaggtaaata

SEQ ID NO: 1874 - RNA, 10 nt, synthetic construct
  source 1..10: mol_type = other RNA
  misc_feature 1..10: note = Description of sequence: Splice site sequence
gaggtaaatc

SEQ ID NO: 1875 - RNA, 10 nt, synthetic construct
  source 1..10: mol_type = other RNA
  misc_feature 1..10: note = Description of sequence: Splice site sequence
gaggtaaatg

SEQ ID NO: 1876 - RNA, 10 nt, synthetic construct
  source 1..10: mol_type = other RNA
  misc_feature 1..10: note = Description of sequence: Splice site sequence
gaggtaaatt

SEQ ID NO: 1877 - RNA, 10 nt, synthetic construct
  source 1..10: mol_type = other RNA
  misc_feature 1..10: note = Description of sequence: Splice site sequence
gaggtaacaa

SEQ ID NO: 1878 - RNA, 10 nt, synthetic construct
  source 1..10: mol_type = other RNA
  misc_feature 1..10: note = Description of sequence: Splice site sequence
gaggtaacag

SEQ ID NO: 1879 - RNA, 10 nt, synthetic construct
  source 1..10: mol_type = other RNA
  misc_feature 1..10: note = Description of sequence: Splice site sequence
gaggtaacca

SEQ ID NO: 1880 - RNA, 10 nt, synthetic construct
  source 1..10: mol_type = other RNA
  misc_feature 1..10: note = Description of sequence: Splice site sequence
gaggtaacct

SEQ ID NO: 1881 - RNA, 10 nt, synthetic construct
  source 1..10: mol_type = other RNA
  misc_feature 1..10: note = Description of sequence: Splice site sequence
gaggtaactt

SEQ ID NO: 1882 - RNA, 10 nt, synthetic construct
  source 1..10: mol_type = other RNA
  misc_feature 1..10: note = Description of sequence: Splice site sequence
gaggtaagaa

SEQ ID NO: 1883 - RNA, 10 nt, synthetic construct
  source 1..10: mol_type = other RNA
  misc_feature 1..10: note = Description of sequence: Splice site sequence
gaggtaagag

SEQ ID NO: 1884 - RNA, 10 nt, synthetic construct
  source 1..10: mol_type = other RNA
  misc_feature 1..10: note = Description of sequence: Splice site sequence
gaggtaagat

SEQ ID NO: 1885 - RNA, 10 nt, synthetic construct
  source 1..10: mol_type = other RNA
  misc_feature 1..10: note = Description of sequence: Splice site sequence
gaggtaagca

SEQ ID NO: 1886 - RNA, 10 nt, synthetic construct
  source 1..10: mol_type = other RNA
  misc_feature 1..10: note = Description of sequence: Splice site sequence
gaggtaagcc

SEQ ID NO: 1887 - RNA, 10 nt, synthetic construct
  source 1..10: mol_type = other RNA
  misc_feature 1..10: note = Description of sequence: Splice site sequence
gaggtaagcg

SEQ ID NO: 1888 - RNA, 10 nt, synthetic construct
  source 1..10: mol_type = other RNA
  misc_feature 1..10: note = Description of sequence: Splice site sequence
gaggtaagct

SEQ ID NO: 1889 - RNA, 10 nt, synthetic construct
  source 1..10: mol_type = other RNA
  misc_feature 1..10: note = Description of sequence: Splice site sequence
gaggtaagga

SEQ ID NO: 1890 - RNA, 10 nt, synthetic construct
  source 1..10: mol_type = other RNA
  misc_feature 1..10: note = Description of sequence: Splice site sequence
gaggtaaggc

SEQ ID NO: 1891 - RNA, 10 nt, synthetic construct
  source 1..10: mol_type = other RNA
  misc_feature 1..10: note = Description of sequence: Splice site sequence
gaggtaaggg

SEQ ID NO: 1892 - RNA, 10 nt, synthetic construct
  source 1..10: mol_type = other RNA
  misc_feature 1..10: note = Description of sequence: Splice site sequence
gaggtaaggt

SEQ ID NO: 1893 - RNA, 10 nt, synthetic construct
  source 1..10: mol_type = other RNA
  misc_feature 1..10: note = Description of sequence: Splice site sequence
gaggtaagta

SEQ ID NO: 1894 - RNA, 10 nt, synthetic construct
  source 1..10: mol_type = other RNA
  misc_feature 1..10: note = Description of sequence: Splice site sequence
gaggtaagtc

SEQ ID NO: 1895 - RNA, 10 nt, synthetic construct
  source 1..10: mol_type = other RNA
  misc_feature 1..10: note = Description of sequence: Splice site sequence
gaggtaataa

SEQ ID NO: 1896 - RNA, 10 nt, synthetic construct
  source 1..10: mol_type = other RNA
  misc_feature 1..10: note = Description of sequence: Splice site sequence
gaggtaatac

SEQ ID NO: 1897 - RNA, 10 nt, synthetic construct
  source 1..10: mol_type = other RNA
  misc_feature 1..10: note = Description of sequence: Splice site sequence
gaggtaatat

SEQ ID NO: 1898 - RNA, 10 nt, synthetic construct
  source 1..10: mol_type = other RNA
  misc_feature 1..10: note = Description of sequence: Splice site sequence
gaggtaatca

SEQ ID NO: 1899 - RNA, 10 nt, synthetic construct
  source 1..10: mol_type = other RNA
  misc_feature 1..10: note = Description of sequence: Splice site sequence
gaggtaatct

SEQ ID NO: 1900 - RNA, 10 nt, synthetic construct
  source 1..10: mol_type = other RNA
  misc_feature 1..10: note = Description of sequence: Splice site sequence
gaggtaatgg

SEQ ID NO: 1901 - RNA, 10 nt, synthetic construct
  source 1..10: mol_type = other RNA
  misc_feature 1..10: note = Description of sequence: Splice site sequence
gaggtaatgt

SEQ ID NO: 1902 - RNA, 10 nt, synthetic construct
  source 1..10: mol_type = other RNA
  misc_feature 1..10: note = Description of sequence: Splice site sequence
gaggtaattg

SEQ ID NO: 1903 - RNA, 10 nt, synthetic construct
  source 1..10: mol_type = other RNA
  misc_feature 1..10: note = Description of sequence: Splice site sequence
gaggtaattt

SEQ ID NO: 1904 - RNA, 10 nt, synthetic construct
  source 1..10: mol_type = other RNA
  misc_feature 1..10: note = Description of sequence: Splice site sequence
gaggtacaaa

SEQ ID NO: 1905 - RNA, 10 nt, synthetic construct
  source 1..10: mol_type = other RNA
  misc_feature 1..10: note = Description of sequence: Splice site sequence
gaggtacaac

SEQ ID NO: 1906 - RNA, 10 nt, synthetic construct
  source 1..10: mol_type = other RNA
  misc_feature 1..10: note = Description of sequence: Splice site sequence
gaggtacaga

SEQ ID NO: 1907 - RNA, 10 nt, synthetic construct
  source 1..10: mol_type = other RNA
  misc_feature 1..10: note = Description of sequence: Splice site sequence
gaggtacagc

SEQ ID NO: 1908 - RNA, 10 nt, synthetic construct
  source 1..10: mol_type = other RNA
  misc_feature 1..10: note = Description of sequence: Splice site sequence
gaggtacagt

SEQ ID NO: 1909 - RNA, 10 nt, synthetic construct
  source 1..10: mol_type = other RNA
  misc_feature 1..10: note = Description of sequence: Splice site sequence
gaggtacata

SEQ ID NO: 1910 - RNA, 10 nt, synthetic construct
  source 1..10: mol_type = other RNA
  misc_feature 1..10: note = Description of sequence: Splice site sequence
gaggtacatt

SEQ ID NO: 1911 - RNA, 10 nt, synthetic construct
  source 1..10: mol_type = other RNA
  misc_feature 1..10: note = Description of sequence: Splice site sequence
gaggtaccag

SEQ ID NO: 1912 - RNA, 10 nt, synthetic construct
  source 1..10: mol_type = other RNA
  misc_feature 1..10: note = Description of sequence: Splice site sequence
gaggtaccga

SEQ ID NO: 1913 - RNA, 10 nt, synthetic construct
  source 1..10: mol_type = other RNA
  misc_feature 1..10: note = Description of sequence: Splice site sequence
gaggtacctg

SEQ ID NO: 1914 - RNA, 10 nt, synthetic construct
  source 1..10: mol_type = other RNA
  misc_feature 1..10: note = Description of sequence: Splice site sequence
gaggtacctt

SEQ ID NO: 1915 - RNA, 10 nt, synthetic construct
  source 1..10: mol_type = other RNA
  misc_feature 1..10: note = Description of sequence: Splice site sequence
gaggtactag

SEQ ID NO: 1916 - RNA, 10 nt, synthetic construct
  source 1..10: mol_type = other RNA
  misc_feature 1..10: note = Description of sequence: Splice site sequence
gaggtactat

SEQ ID NO: 1917 - RNA, 10 nt, synthetic construct
  source 1..10: mol_type = other RNA
  misc_feature 1..10: note = Description of sequence: Splice site sequence
gaggtactcc

SEQ ID NO: 1918 - RNA, 10 nt, synthetic construct
  source 1..10: mol_type = other RNA
  misc_feature 1..10: note = Description of sequence: Splice site sequence
gaggtactgc

SEQ ID NO: 1919 - RNA, 10 nt, synthetic construct
  source 1..10: mol_type = other RNA
  misc_feature 1..10: note = Description of sequence: Splice site sequence
gaggtactgg

SEQ ID NO: 1920 - RNA, 10 nt, synthetic construct
  source 1..10: mol_type = other RNA
  misc_feature 1..10: note = Description of sequence: Splice site sequence
gaggtactgt

SEQ ID NO: 1921 - RNA, 10 nt, synthetic construct
  source 1..10: mol_type = other RNA
  misc_feature 1..10: note = Description of sequence: Splice site sequence
gaggtacttg

SEQ ID NO: 1922 - RNA, 10 nt, synthetic construct
  source 1..10: mol_type = other RNA
  misc_feature 1..10: note = Description of sequence: Splice site sequence
gaggtacttt

SEQ ID NO: 1923 - RNA, 10 nt, synthetic construct
  source 1..10: mol_type = other RNA
  misc_feature 1..10: note = Description of sequence: Splice site sequence
gaggtagaag

SEQ ID NO: 1924 - RNA, 10 nt, synthetic construct
  source 1..10: mol_type = other RNA
  misc_feature 1..10: note = Description of sequence: Splice site sequence
gaggtagaga

SEQ ID NO: 1925 - RNA, 10 nt, synthetic construct
  source 1..10: mol_type = other RNA
  misc_feature 1..10: note = Description of sequence: Splice site sequence
gaggtagagg

SEQ ID NO: 1926 - RNA, 10 nt, synthetic construct
  source 1..10: mol_type = other RNA
  misc_feature 1..10: note = Description of sequence: Splice site sequence
gaggtagagt

SEQ ID NO: 1927 - RNA, 10 nt, synthetic construct
  source 1..10: mol_type = other RNA
  misc_feature 1..10: note = Description of sequence: Splice site sequence
gaggtagatc

SEQ ID NO: 1928 - RNA, 10 nt, synthetic construct
  source 1..10: mol_type = other RNA
  misc_feature 1..10: note = Description of sequence: Splice site sequence
gaggtagcta

SEQ ID NO: 1929 - RNA, 10 nt, synthetic construct
  source 1..10: mol_type = other RNA
  misc_feature 1..10: note = Description of sequence: Splice site sequence
gaggtagctg

SEQ ID NO: 1930 - RNA, 10 nt, synthetic construct
  source 1..10: mol_type = other RNA
  misc_feature 1..10: note = Description of sequence: Splice site sequence
gaggtaggaa

SEQ ID NO: 1931 - RNA, 10 nt, synthetic construct
  source 1..10: mol_type = other RNA
  misc_feature 1..10: note = Description of sequence: Splice site sequence
gaggtaggag

SEQ ID NO: 1932 - RNA, 10 nt, synthetic construct
  source 1..10: mol_type = other RNA
  misc_feature 1..10: note = Description of sequence: Splice site sequence
gaggtaggca

SEQ ID NO: 1933 - RNA, 10 nt, synthetic construct
  source 1..10: mol_type = other RNA
  misc_feature 1..10: note = Description of sequence: Splice site sequence
gaggtaggct

SEQ ID NO: 1934 - RNA, 10 nt, synthetic construct
  source 1..10: mol_type = other RNA
  misc_feature 1..10: note = Description of sequence: Splice site sequence
gaggtaggga

SEQ ID NO: 1935 - RNA, 10 nt, synthetic construct
  source 1..10: mol_type = other RNA
  misc_feature 1..10: note = Description of sequence: Splice site sequence
gaggtagggc

SEQ ID NO: 1936 - RNA, 10 nt, synthetic construct
  source 1..10: mol_type = other RNA
  misc_feature 1..10: note = Description of sequence: Splice site sequence
gaggtagggg

SEQ ID NO: 1937 - RNA, 10 nt, synthetic construct
  source 1..10: mol_type = other RNA
  misc_feature 1..10: note = Description of sequence: Splice site sequence
gaggtaggta

SEQ ID NO: 1938 - RNA, 10 nt, synthetic construct
  source 1..10: mol_type = other RNA
  misc_feature 1..10: note = Description of sequence: Splice site sequence
gaggtaggtg

SEQ ID NO: 1939 - RNA, 10 nt, synthetic construct
  source 1..10: mol_type = other RNA
  misc_feature 1..10: note = Description of sequence: Splice site sequence
gaggtaggtt

SEQ ID NO: 1940 - RNA, 10 nt, synthetic construct
  source 1..10: mol_type = other RNA
  misc_feature 1..10: note = Description of sequence: Splice site sequence
gaggtagtaa

SEQ ID NO: 1941 - RNA, 10 nt, synthetic construct
  source 1..10: mol_type = other RNA
  misc_feature 1..10: note = Description of sequence: Splice site sequence
gaggtagtag

SEQ ID NO: 1942 - RNA, 10 nt, synthetic construct
  source 1..10: mol_type = other RNA
  misc_feature 1..10: note = Description of sequence: Splice site sequence
gaggtagtat

SEQ ID NO: 1943 - RNA, 10 nt, synthetic construct
  source 1..10: mol_type = other RNA
  misc_feature 1..10: note = Description of sequence: Splice site sequence
gaggtagtct

SEQ ID NO: 1944 - RNA, 10 nt, synthetic construct
  source 1..10: mol_type = other RNA
  misc_feature 1..10: note = Description of sequence: Splice site sequence
gaggtagtgc

SEQ ID NO: 1945 - RNA, 10 nt, synthetic construct
  source 1..10: mol_type = other RNA
  misc_feature 1..10: note = Description of sequence: Splice site sequence
gaggtagtgg

SEQ ID NO: 1946 - RNA, 10 nt, synthetic construct
  source 1..10: mol_type = other RNA
  misc_feature 1..10: note = Description of sequence: Splice site sequence
gaggtagtta

SEQ ID NO: 1947 - RNA, 10 nt, synthetic construct
  source 1..10: mol_type = other RNA
  misc_feature 1..10: note = Description of sequence: Splice site sequence
gaggtagttg

SEQ ID NO: 1948 - RNA, 10 nt, synthetic construct
  source 1..10: mol_type = other RNA
  misc_feature 1..10: note = Description of sequence: Splice site sequence
gaggtataag

SEQ ID NO: 1949 - RNA, 10 nt, synthetic construct
  source 1..10: mol_type = other RNA
  misc_feature 1..10: note = Description of sequence: Splice site sequence
gaggtatact

SEQ ID NO: 1950 - RNA, 10 nt, synthetic construct
  source 1..10: mol_type = other RNA
  misc_feature 1..10: note = Description of sequence: Splice site sequence
gaggtatagc

SEQ ID NO: 1951 - RNA, 10 nt, synthetic construct
  source 1..10: mol_type = other RNA
  misc_feature 1..10: note = Description of sequence: Splice site sequence
gaggtatatg

SEQ ID NO: 1952 - RNA, 10 nt, synthetic construct
  source 1..10: mol_type = other RNA
  misc_feature 1..10: note = Description of sequence: Splice site sequence
gaggtatatt

SEQ ID NO: 1953 - RNA, 10 nt, synthetic construct
  source 1..10: mol_type = other RNA
  misc_feature 1..10: note = Description of sequence: Splice site sequence
gaggtatcat

SEQ ID NO: 1954 - RNA, 10 nt, synthetic construct
  source 1..10: mol_type = other RNA
  misc_feature 1..10: note = Description of sequence: Splice site sequence
gaggtatctg

SEQ ID NO: 1955 - RNA, 10 nt, synthetic construct
  source 1..10: mol_type = other RNA
  misc_feature 1..10: note = Description of sequence: Splice site sequence
gaggtatctt

SEQ ID NO: 1956 - RNA, 10 nt, synthetic construct
  source 1..10: mol_type = other RNA
  misc_feature 1..10: note = Description of sequence: Splice site sequence
gaggtatgaa

SEQ ID NO: 1957 - RNA, 10 nt, synthetic construct
  source 1..10: mol_type = other RNA
  misc_feature 1..10: note = Description of sequence: Splice site sequence
gaggtatgac

SEQ ID NO: 1958 - RNA, 10 nt, synthetic construct
  source 1..10: mol_type = other RNA
  misc_feature 1..10: note = Description of sequence: Splice site sequence
gaggtatgag

SEQ ID NO: 1959 - RNA, 10 nt, synthetic construct
  source 1..10: mol_type = other RNA
  misc_feature 1..10: note = Description of sequence: Splice site sequence
gaggtatgcc

SEQ ID NO: 1960 - RNA, 10 nt, synthetic construct
  source 1..10: mol_type = other RNA
  misc_feature 1..10: note = Description of sequence: Splice site sequence
gaggtatgcg

SEQ ID NO: 1961 - RNA, 10 nt, synthetic construct
  source 1..10: mol_type = other RNA
  misc_feature 1..10: note = Description of sequence: Splice site sequence
gaggtatgct

SEQ ID NO: 1962 - RNA, 10 nt, synthetic construct
  source 1..10: mol_type = other RNA
  misc_feature 1..10: note = Description of sequence: Splice site sequence
gaggtatgga

SEQ ID NO: 1963 - RNA, 10 nt, synthetic construct
  source 1..10: mol_type = other RNA
  misc_feature 1..10: note = Description of sequence: Splice site sequence
gaggtatggg

SEQ ID NO: 1964 - RNA, 10 nt, synthetic construct
  source 1..10: mol_type = other RNA
  misc_feature 1..10: note = Description of sequence: Splice site sequence
gaggtatggt

SEQ ID NO: 1965 - RNA, 10 nt, synthetic construct
  source 1..10: mol_type = other RNA
  misc_feature 1..10: note = Description of sequence: Splice site sequence
gaggtatgta

SEQ ID NO: 1966 - RNA, 10 nt, synthetic construct
  source 1..10: mol_type = other RNA
  misc_feature 1..10: note = Description of sequence: Splice site sequence
gaggtatgtc

SEQ ID NO: 1967 - RNA, 10 nt, synthetic construct
  source 1..10: mol_type = other RNA
  misc_feature 1..10: note = Description of sequence: Splice site sequence
gaggtatgtg

SEQ ID NO: 1968 - RNA, 10 nt, synthetic construct
  source 1..10: mol_type = other RNA
  misc_feature 1..10: note = Description of sequence: Splice site sequence
gaggtatgtt

SEQ ID NO: 1969 - RNA, 10 nt, synthetic construct
  source 1..10: mol_type = other RNA
  misc_feature 1..10: note = Description of sequence: Splice site sequence
gaggtattcc

SEQ ID NO: 1970 - RNA, 10 nt, synthetic construct
  source 1..10: mol_type = other RNA
  misc_feature 1..10: note = Description of sequence: Splice site sequence
gaggtattga

SEQ ID NO: 1971 - RNA, 10 nt, synthetic construct
  source 1..10: mol_type = other RNA
  misc_feature 1..10: note = Description of sequence: Splice site sequence
gaggtattgt

SEQ ID NO: 1972 - RNA, 10 nt, synthetic construct
  source 1..10: mol_type = other RNA
  misc_feature 1..10: note = Description of sequence: Splice site sequence
gaggtattta

SEQ ID NO: 1973 - RNA, 10 nt, synthetic construct
  source 1..10: mol_type = other RNA
  misc_feature 1..10: note = Description of sequence: Splice site sequence
gaggtatttc

SEQ ID NO: 1974 - RNA, 10 nt, synthetic construct
  source 1..10: mol_type = other RNA
  misc_feature 1..10: note = Description of sequence: Splice site sequence
gaggtatttg

SEQ ID NO: 1975 - RNA, 10 nt, synthetic construct
  source 1..10: mol_type = other RNA
  misc_feature 1..10: note = Description of sequence: Splice site sequence
gaggtatttt

SEQ ID NO: 1976 - RNA, 10 nt, synthetic construct
  source 1..10: mol_type = other RNA
  misc_feature 1..10: note = Description of sequence: Splice site sequence
gaggtcaaca

SEQ ID NO: 1977 - RNA, 10 nt, synthetic construct
  source 1..10: mol_type = other RNA
  misc_feature 1..10: note = Description of sequence: Splice site sequence
gaggtcaagg

SEQ ID NO: 1978 - RNA, 10 nt, synthetic construct
  source 1..10: mol_type = other RNA
  misc_feature 1..10: note = Description of sequence: Splice site sequence
gaggtcaatg

SEQ ID NO: 1979 - RNA, 10 nt, synthetic construct
  source 1..10: mol_type = other RNA
  misc_feature 1..10: note = Description of sequence: Splice site sequence
gaggtcactg

SEQ ID NO: 1980 - RNA, 10 nt, synthetic construct
  source 1..10: mol_type = other RNA
  misc_feature 1..10: note = Description of sequence: Splice site sequence
gaggtcagaa

SEQ ID NO: 1981 - RNA, 10 nt, synthetic construct
  source 1..10: mol_type = other RNA
  misc_feature 1..10: note = Description of sequence: Splice site sequence
gaggtcagag

SEQ ID NO: 1982 - RNA, 10 nt, synthetic construct
  source 1..10: mol_type = other RNA
  misc_feature 1..10: note = Description of sequence: Splice site sequence
gaggtcagct

SEQ ID NO: 1983 - RNA, 10 nt, synthetic construct
  source 1..10: mol_type = other RNA
  misc_feature 1..10: note = Description of sequence: Splice site sequence
gaggtcagga

SEQ ID NO: 1984 - RNA, 10 nt, synthetic construct
  source 1..10: mol_type = other RNA
  misc_feature 1..10: note = Description of sequence: Splice site sequence
gaggtcaggc

SEQ ID NO: 1985 - RNA, 10 nt, synthetic construct
  source 1..10: mol_type = other RNA
  misc_feature 1..10: note = Description of sequence: Splice site sequence
gaggtcaggg

SEQ ID NO: 1986 - RNA, 10 nt, synthetic construct
  source 1..10: mol_type = other RNA
  misc_feature 1..10: note = Description of sequence: Splice site sequence
gaggtcaggt

SEQ ID NO: 1987 - RNA, 10 nt, synthetic construct
  source 1..10: mol_type = other RNA
  misc_feature 1..10: note = Description of sequence: Splice site sequence
gaggtcagta

SEQ ID NO: 1988 - RNA, 10 nt, synthetic construct
  source 1..10: mol_type = other RNA
  misc_feature 1..10: note = Description of sequence: Splice site sequence
gaggtcatat

SEQ ID NO: 1989 - RNA, 10 nt, synthetic construct
  source 1..10: mol_type = other RNA
  misc_feature 1..10: note = Description of sequence: Splice site sequence
gaggtcatgt

SEQ ID NO: 1990 - RNA, 10 nt, synthetic construct
  source 1..10: mol_type = other RNA
  misc_feature 1..10: note = Description of sequence: Splice site sequence
gaggtcattt

SEQ ID NO: 1991 - RNA, 10 nt, synthetic construct
  source 1..10: mol_type = other RNA
  misc_feature 1..10: note = Description of sequence: Splice site sequence
gaggtccata

SEQ ID NO: 1992 - RNA, 10 nt, synthetic construct
  source 1..10: mol_type = other RNA
  misc_feature 1..10: note = Description of sequence: Splice site sequence
gaggtccatc

SEQ ID NO: 1993 - RNA, 10 nt, synthetic construct
  source 1..10: mol_type = other RNA
  misc_feature 1..10: note = Description of sequence: Splice site sequence
gaggtccggg

SEQ ID NO: 1994 - RNA, 10 nt, synthetic construct
  source 1..10: mol_type = other RNA
  misc_feature 1..10: note = Description of sequence: Splice site sequence
gaggtccggt

SEQ ID NO: 1995 - RNA, 10 nt, synthetic construct
  source 1..10: mol_type = other RNA
  misc_feature 1..10: note = Description of sequence: Splice site sequence
gaggtccttg

SEQ ID NO: 1996 - RNA, 10 nt, synthetic construct
  source 1..10: mol_type = other RNA
  misc_feature 1..10: note = Description of sequence: Splice site sequence
gaggtcgggg

SEQ ID NO: 1997 - RNA, 10 nt, synthetic construct
  source 1..10: mol_type = other RNA
  misc_feature 1..10: note = Description of sequence: Splice site sequence
gaggtctcgt

SEQ ID NO: 1998 - RNA, 10 nt, synthetic construct
  source 1..10: mol_type = other RNA
  misc_feature 1..10: note = Description of sequence: Splice site sequence
gaggtctgag

SEQ ID NO: 1999 - RNA, 10 nt, synthetic construct
  source 1..10: mol_type = other RNA
  misc_feature 1..10: note = Description of sequence: Splice site sequence
gaggtctggt

SEQ ID NO: 2000 - RNA, 10 nt, synthetic construct
  source 1..10: mol_type = other RNA
  misc_feature 1..10: note = Description of sequence: Splice site sequence
gaggtctgtc

SEQ ID NO: 2001 - RNA, 10 nt, synthetic construct
  source 1..10: mol_type = other RNA
  misc_feature 1..10: note = Description of sequence: Splice site sequence
gaggtctgtt

SEQ ID NO: 2002 - RNA, 10 nt, synthetic construct
  source 1..10: mol_type = other RNA
  misc_feature 1..10: note = Description of sequence: Splice site sequence
gaggtctttt

SEQ ID NO: 2003 - RNA, 10 nt, synthetic construct
  source 1..10: mol_type = other RNA
  misc_feature 1..10: note = Description of sequence: Splice site sequence
gaggtgaaaa

SEQ ID NO: 2004 - RNA, 10 nt, synthetic construct
  source 1..10: mol_type = other RNA
  misc_feature 1..10: note = Description of sequence: Splice site sequence
gaggtgaaat

SEQ ID NO: 2005 - RNA, 10 nt, synthetic construct
  source 1..10: mol_type = other RNA
  misc_feature 1..10: note = Description of sequence: Splice site sequence
gaggtgaaca

SEQ ID NO: 2006 - RNA, 10 nt, synthetic construct
  source 1..10: mol_type = other RNA
  misc_feature 1..10: note = Description of sequence: Splice site sequence
gaggtgaagg

SEQ ID NO: 2007 - RNA, 10 nt, synthetic construct
  source 1..10: mol_type = other RNA
  misc_feature 1..10: note = Description of sequence: Splice site sequence
gaggtgaata

SEQ ID NO: 2008 - RNA, 10 nt, synthetic construct
  source 1..10: mol_type = other RNA
  misc_feature 1..10: note = Description of sequence: Splice site sequence
gaggtgaatt

SEQ ID NO: 2009 - RNA, 10 nt, synthetic construct
  source 1..10: mol_type = other RNA
  misc_feature 1..10: note = Description of sequence: Splice site sequence
gaggtgacat

SEQ ID NO: 2010 - RNA, 10 nt, synthetic construct
  source 1..10: mol_type = other RNA
  misc_feature 1..10: note = Description of sequence: Splice site sequence
gaggtgacca

SEQ ID NO: 2011 - RNA, 10 nt, synthetic construct
  source 1..10: mol_type = other RNA
  misc_feature 1..10: note = Description of sequence: Splice site sequence
gaggtgacct

SEQ ID NO: 2012 - RNA, 10 nt, synthetic construct
  source 1..10: mol_type = other RNA
  misc_feature 1..10: note = Description of sequence: Splice site sequence
gaggtgacta

SEQ ID NO: 2013 - RNA, 10 nt, synthetic construct
  source 1..10: mol_type = other RNA
  misc_feature 1..10: note = Description of sequence: Splice site sequence
gaggtgactt

SEQ ID NO: 2014 - RNA, 10 nt, synthetic construct
  source 1..10: mol_type = other RNA
  misc_feature 1..10: note = Description of sequence: Splice site sequence
gaggtgagaa

SEQ ID NO: 2015 - RNA, 10 nt, synthetic construct
  source 1..10: mol_type = other RNA
  misc_feature 1..10: note = Description of sequence: Splice site sequence
gaggtgagac

SEQ ID NO: 2016 - RNA, 10 nt, synthetic construct
  source 1..10: mol_type = other RNA
  misc_feature 1..10: note = Description of sequence: Splice site sequence
gaggtgagag

SEQ ID NO: 2017 - RNA, 10 nt, synthetic construct
  source 1..10: mol_type = other RNA
  misc_feature 1..10: note = Description of sequence: Splice site sequence
gaggtgagat

SEQ ID NO: 2018 - RNA, 10 nt, synthetic construct
  source 1..10: mol_type = other RNA
  misc_feature 1..10: note = Description of sequence: Splice site sequence
gaggtgagca

SEQ ID NO: 2019 - RNA, 10 nt, synthetic construct
  source 1..10: mol_type = other RNA
  misc_feature 1..10: note = Description of sequence: Splice site sequence
gaggtgagcc

SEQ ID NO: 2020 - RNA, 10 nt, synthetic construct
  source 1..10: mol_type = other RNA
  misc_feature 1..10: note = Description of sequence: Splice site sequence
gaggtgagcg

SEQ ID NO: 2021 - RNA, 10 nt, synthetic construct
  source 1..10: mol_type = other RNA
  misc_feature 1..10: note = Description of sequence: Splice site sequence
gaggtgagct

SEQ ID NO: 2022 - RNA, 10 nt, synthetic construct
  source 1..10: mol_type = other RNA
  misc_feature 1..10: note = Description of sequence: Splice site sequence
gaggtgagga

SEQ ID NO: 2023 - RNA, 10 nt, synthetic construct
  source 1..10: mol_type = other RNA
  misc_feature 1..10: note = Description of sequence: Splice site sequence
gaggtgaggc

SEQ ID NO: 2024 - RNA, 10 nt, synthetic construct
  source 1..10: mol_type = other RNA
  misc_feature 1..10: note = Description of sequence: Splice site sequence
gaggtgaggg

SEQ ID NO: 2025 - RNA, 10 nt, synthetic construct
  source 1..10: mol_type = other RNA
  misc_feature 1..10: note = Description of sequence: Splice site sequence
gaggtgagta

SEQ ID NO: 2026 - RNA, 10 nt, synthetic construct
  source 1..10: mol_type = other RNA
  misc_feature 1..10: note = Description of sequence: Splice site sequence
gaggtgagtg

SEQ ID NO: 2027 - RNA, 10 nt, synthetic construct
  source 1..10: mol_type = other RNA
  misc_feature 1..10: note = Description of sequence: Splice site sequence
gaggtgagtt

SEQ ID NO: 2028 - RNA, 10 nt, synthetic construct
  source 1..10: mol_type = other RNA
  misc_feature 1..10: note = Description of sequence: Splice site sequence
gaggtgatat

SEQ ID NO: 2029 - RNA, 10 nt, synthetic construct
  source 1..10: mol_type = other RNA
  misc_feature 1..10: note = Description of sequence: Splice site sequence
gaggtgatcc

SEQ ID NO: 2030 - RNA, 10 nt, synthetic construct
  source 1..10: mol_type = other RNA
  misc_feature 1..10: note = Description of sequence: Splice site sequence
gaggtgatct

SEQ ID NO: 2031 - RNA, 10 nt, synthetic construct
  source 1..10: mol_type = other RNA
  misc_feature 1..10: note = Description of sequence: Splice site sequence
gaggtgatga

SEQ ID NO: 2032 - RNA, 10 nt, synthetic construct
  source 1..10: mol_type = other RNA
  misc_feature 1..10: note = Description of sequence: Splice site sequence
gaggtgatgg

SEQ ID NO: 2033 - RNA, 10 nt, synthetic construct
  source 1..10: mol_type = other RNA
  misc_feature 1..10: note = Description of sequence: Splice site sequence
gaggtgatgt

SEQ ID NO: 2034 - RNA, 10 nt, synthetic construct
  source 1..10: mol_type = other RNA
  misc_feature 1..10: note = Description of sequence: Splice site sequence
gaggtgattc

SEQ ID NO: 2035 - RNA, 10 nt, synthetic construct
  source 1..10: mol_type = other RNA
  misc_feature 1..10: note = Description of sequence: Splice site sequence
gaggtgcaca

SEQ ID NO: 2036 - RNA, 10 nt, synthetic construct
  source 1..10: mol_type = other RNA
  misc_feature 1..10: note = Description of sequence: Splice site sequence
gaggtgcaga

SEQ ID NO: 2037 - RNA, 10 nt, synthetic construct
  source 1..10: mol_type = other RNA
  misc_feature 1..10: note = Description of sequence: Splice site sequence
gaggtgcagc

SEQ ID NO: 2038 - RNA, 10 nt, synthetic construct
  source 1..10: mol_type = other RNA
  misc_feature 1..10: note = Description of sequence: Splice site sequence
gaggtgcagg

SEQ ID NO: 2039 - RNA, 10 nt, synthetic construct
  source 1..10: mol_type = other RNA
  misc_feature 1..10: note = Description of sequence: Splice site sequence
gaggtgccag

SEQ ID NO: 2040 - RNA, 10 nt, synthetic construct
  source 1..10: mol_type = other RNA
  misc_feature 1..10: note = Description of sequence: Splice site sequence
gaggtgccca

SEQ ID NO: 2041 - RNA, 10 nt, synthetic construct
  source 1..10: mol_type = other RNA
  misc_feature 1..10: note = Description of sequence: Splice site sequence
gaggtgcctt

SEQ ID NO: 2042 - RNA, 10 nt, synthetic construct
  source 1..10: mol_type = other RNA
  misc_feature 1..10: note = Description of sequence: Splice site sequence
gaggtgcggg

SEQ ID NO: 2043 - RNA, 10 nt, synthetic construct
  source 1..10: mol_type = other RNA
  misc_feature 1..10: note = Description of sequence: Splice site sequence
gaggtgcgtg

SEQ ID NO: 2044 - RNA, 10 nt, synthetic construct
  source 1..10: mol_type = other RNA
  misc_feature 1..10: note = Description of sequence: Splice site sequence
gaggtgctcc

SEQ ID NO: 2045 - RNA, 10 nt, synthetic construct
  source 1..10: mol_type = other RNA
  misc_feature 1..10: note = Description of sequence: Splice site sequence
gaggtgctgg

SEQ ID NO: 2046 - RNA, 10 nt, synthetic construct
  source 1..10: mol_type = other RNA
  misc_feature 1..10: note = Description of sequence: Splice site sequence
gaggtgctta

SEQ ID NO: 2047 - RNA, 10 nt, synthetic construct
  source 1..10: mol_type = other RNA
  misc_feature 1..10: note = Description of sequence: Splice site sequence
gaggtgcttg

SEQ ID NO: 2048 - RNA, 10 nt, synthetic construct
  source 1..10: mol_type = other RNA
  misc_feature 1..10: note = Description of sequence: Splice site sequence
gaggtggaaa

SEQ ID NO: 2049 - RNA, 10 nt, synthetic construct
  source 1..10: mol_type = other RNA
  misc_feature 1..10: note = Description of sequence: Splice site sequence
gaggtggaat

SEQ ID NO: 2050 - RNA, 10 nt, synthetic construct
  source 1..10: mol_type = other RNA
  misc_feature 1..10: note = Description of sequence: Splice site sequence
gaggtggacc

SEQ ID NO: 2051 - RNA, 10 nt, synthetic construct
  source 1..10: mol_type = other RNA
  misc_feature 1..10: note = Description of sequence: Splice site sequence
gaggtggacg

SEQ ID NO: 2052 - RNA, 10 nt, synthetic construct
  source 1..10: mol_type = other RNA
  misc_feature 1..10: note = Description of sequence: Splice site sequence
gaggtggagg

SEQ ID NO: 2053 - RNA, 10 nt, synthetic construct
  source 1..10: mol_type = other RNA
  misc_feature 1..10: note = Description of sequence: Splice site sequence
gaggtggctg

SEQ ID NO: 2054 - RNA, 10 nt, synthetic construct
  source 1..10: mol_type = other RNA
  misc_feature 1..10: note = Description of sequence: Splice site sequence
gaggtgggaa

SEQ ID NO: 2055 - RNA, 10 nt, synthetic construct
  source 1..10: mol_type = other RNA
  misc_feature 1..10: note = Description of sequence: Splice site sequence
gaggtgggag

SEQ ID NO: 2056 - RNA, 10 nt, synthetic construct
  source 1..10: mol_type = other RNA
  misc_feature 1..10: note = Description of sequence: Splice site sequence
gaggtgggat

SEQ ID NO: 2057 - RNA, 10 nt, synthetic construct
  source 1..10: mol_type = other RNA
  misc_feature 1..10: note = Description of sequence: Splice site sequence
gaggtgggca

SEQ ID NO: 2058 - RNA, 10 nt, synthetic construct
  source 1..10: mol_type = other RNA
  misc_feature 1..10: note = Description of sequence: Splice site sequence
gaggtgggcg

SEQ ID NO: 2059 - RNA, 10 nt, synthetic construct
  source 1..10: mol_type = other RNA
  misc_feature 1..10: note = Description of sequence: Splice site sequence
gaggtgggct

SEQ ID NO: 2060 - RNA, 10 nt, synthetic construct
  source 1..10: mol_type = other RNA
  misc_feature 1..10: note = Description of sequence: Splice site sequence
gaggtgggga

SEQ ID NO: 2061 - RNA, 10 nt, synthetic construct
  source 1..10: mol_type = other RNA
  misc_feature 1..10: note = Description of sequence: Splice site sequence
gaggtggggc

SEQ ID NO: 2062 - RNA, 10 nt, synthetic construct
  source 1..10: mol_type = other RNA
  misc_feature 1..10: note = Description of sequence: Splice site sequence
gaggtggggg

SEQ ID NO: 2063 - RNA, 10 nt, synthetic construct
  source 1..10: mol_type = other RNA
  misc_feature 1..10: note = Description of sequence: Splice site sequence
gaggtgggta

SEQ ID NO: 2064 - RNA, 10 nt, synthetic construct
  source 1..10: mol_type = other RNA
  misc_feature 1..10: note = Description of sequence: Splice site sequence
gaggtgggtc

SEQ ID NO: 2065 - RNA, 10 nt, synthetic construct
  source 1..10: mol_type = other RNA
  misc_feature 1..10: note = Description of sequence: Splice site sequence
gaggtgggtg

SEQ ID NO: 2066 - RNA, 10 nt, synthetic construct
  source 1..10: mol_type = other RNA
  misc_feature 1..10: note = Description of sequence: Splice site sequence
gaggtgggtt

SEQ ID NO: 2067 - RNA, 10 nt, synthetic construct
  source 1..10: mol_type = other RNA
  misc_feature 1..10: note = Description of sequence: Splice site sequence
gaggtggtat

SEQ ID NO: 2068 - RNA, 10 nt, synthetic construct
  source 1..10: mol_type = other RNA
  misc_feature 1..10: note = Description of sequence: Splice site sequence
gaggtggttc

SEQ ID NO: 2069 - RNA, 10 nt, synthetic construct
  source 1..10: mol_type = other RNA
  misc_feature 1..10: note = Description of sequence: Splice site sequence
gaggtgtcat

SEQ ID NO: 2070 - RNA, 10 nt, synthetic construct
  source 1..10: mol_type = other RNA
  misc_feature 1..10: note = Description of sequence: Splice site sequence
gaggtgtgag

SEQ ID NO: 2071 - RNA, 10 nt, synthetic construct
  source 1..10: mol_type = other RNA
  misc_feature 1..10: note = Description of sequence: Splice site sequence
gaggtgtgat

SEQ ID NO: 2072 - RNA, 10 nt, synthetic construct
  source 1..10: mol_type = other RNA
  misc_feature 1..10: note = Description of sequence: Splice site sequence
gaggtgtgca

SEQ ID NO: 2073 - RNA, 10 nt, synthetic construct
  source 1..10: mol_type = other RNA
  misc_feature 1..10: note = Description of sequence: Splice site sequence
gaggtgtgct

SEQ ID NO: 2074 - RNA, 10 nt, synthetic construct
  source 1..10: mol_type = other RNA
  misc_feature 1..10: note = Description of sequence: Splice site sequence
gaggtgtgga

SEQ ID NO: 2075 - RNA, 10 nt, synthetic construct
  source 1..10: mol_type = other RNA
  misc_feature 1..10: note = Description of sequence: Splice site sequence
gaggtgtggg

SEQ ID NO: 2076 - RNA, 10 nt, synthetic construct
  source 1..10: mol_type = other RNA
  misc_feature 1..10: note = Description of sequence: Splice site sequence
gaggtgtggt

SEQ ID NO: 2077 - RNA, 10 nt, synthetic construct
  source 1..10: mol_type = other RNA
  misc_feature 1..10: note = Description of sequence: Splice site sequence
gaggtgtgta

SEQ ID NO: 2078 - RNA, 10 nt, synthetic construct
  source 1..10: mol_type = other RNA
  misc_feature 1..10: note = Description of sequence: Splice site sequence
gaggtgtgtg

SEQ ID NO: 2079 - RNA, 10 nt, synthetic construct
  source 1..10: mol_type = other RNA
  misc_feature 1..10: note = Description of sequence: Splice site sequence
gaggttaaat

SEQ ID NO: 2080 - RNA, 10 nt, synthetic construct
  source 1..10: mol_type = other RNA
  misc_feature 1..10: note = Description of sequence: Splice site sequence
gaggttaaga

SEQ ID NO: 2081 - RNA, 10 nt, synthetic construct
  source 1..10: mol_type = other RNA
  misc_feature 1..10: note = Description of sequence: Splice site sequence
gaggttaata

SEQ ID NO: 2082 - RNA, 10 nt, synthetic construct
  source 1..10: mol_type = other RNA
  misc_feature 1..10: note = Description of sequence: Splice site sequence
gaggttaccg

SEQ ID NO: 2083 - RNA, 10 nt, synthetic construct
  source 1..10: mol_type = other RNA
  misc_feature 1..10: note = Description of sequence: Splice site sequence
gaggttagaa

SEQ ID NO: 2084 - RNA, 10 nt, synthetic construct
  source 1..10: mol_type = other RNA
  misc_feature 1..10: note = Description of sequence: Splice site sequence
gaggttagac

SEQ ID NO: 2085 - RNA, 10 nt, synthetic construct
  source 1..10: mol_type = other RNA
  misc_feature 1..10: note = Description of sequence: Splice site sequence
gaggttagag

SEQ ID NO: 2086 - RNA, 10 nt, synthetic construct
  source 1..10: mol_type = other RNA
  misc_feature 1..10: note = Description of sequence: Splice site sequence
gaggttaggt

SEQ ID NO: 2087 - RNA, 10 nt, synthetic construct
  source 1..10: mol_type = other RNA
  misc_feature 1..10: note = Description of sequence: Splice site sequence
gaggttagta

SEQ ID NO: 2088 - RNA, 10 nt, synthetic construct
  source 1..10: mol_type = other RNA
  misc_feature 1..10: note = Description of sequence: Splice site sequence
gaggttagtc

SEQ ID NO: 2089 - RNA, 10 nt, synthetic construct
  source 1..10: mol_type = other RNA
  misc_feature 1..10: note = Description of sequence: Splice site sequence
gaggttagtg

SEQ ID NO: 2090 - RNA, 10 nt, synthetic construct
  source 1..10: mol_type = other RNA
  misc_feature 1..10: note = Description of sequence: Splice site sequence
gaggttagtt

SEQ ID NO: 2091 - RNA, 10 nt, synthetic construct
  source 1..10: mol_type = other RNA
  misc_feature 1..10: note = Description of sequence: Splice site sequence
gaggttatgt

SEQ ID NO: 2092 - RNA, 10 nt, synthetic construct
  source 1..10: mol_type = other RNA
  misc_feature 1..10: note = Description of sequence: Splice site sequence
gaggttattc

SEQ ID NO: 2093 - RNA, 10 nt, synthetic construct
  source 1..10: mol_type = other RNA
  misc_feature 1..10: note = Description of sequence: Splice site sequence
gaggttcaaa

SEQ ID NO: 2094 - RNA, 10 nt, synthetic construct
  source 1..10: mol_type = other RNA
  misc_feature 1..10: note = Description of sequence: Splice site sequence
gaggttcata

SEQ ID NO: 2095 - RNA, 10 nt, synthetic construct
  source 1..10: mol_type = other RNA
  misc_feature 1..10: note = Description of sequence: Splice site sequence
gaggttctga

SEQ ID NO: 2096 - RNA, 10 nt, synthetic construct
  source 1..10: mol_type = other RNA
  misc_feature 1..10: note = Description of sequence: Splice site sequence
gaggttgaag

SEQ ID NO: 2097 - RNA, 10 nt, synthetic construct
  source 1..10: mol_type = other RNA
  misc_feature 1..10: note = Description of sequence: Splice site sequence
gaggttgcag

SEQ ID NO: 2098 - RNA, 10 nt, synthetic construct
  source 1..10: mol_type = other RNA
  misc_feature 1..10: note = Description of sequence: Splice site sequence
gaggttgctg

SEQ ID NO: 2099 - RNA, 10 nt, synthetic construct
  source 1..10: mol_type = other RNA
  misc_feature 1..10: note = Description of sequence: Splice site sequence
gaggttggaa

SEQ ID NO: 2100 - RNA, 10 nt, synthetic construct
  source 1..10: mol_type = other RNA
  misc_feature 1..10: note = Description of sequence: Splice site sequence
gaggttggag

SEQ ID NO: 2101 - RNA, 10 nt, synthetic construct
  source 1..10: mol_type = other RNA
  misc_feature 1..10: note = Description of sequence: Splice site sequence
gaggttggat

SEQ ID NO: 2102 - RNA, 10 nt, synthetic construct
  source 1..10: mol_type = other RNA
  misc_feature 1..10: note = Description of sequence: Splice site sequence
gaggttggta

SEQ ID NO: 2103 - RNA, 10 nt, synthetic construct
  source 1..10: mol_type = other RNA
  misc_feature 1..10: note = Description of sequence: Splice site sequence
gaggttggtc

SEQ ID NO: 2104 - RNA, 10 nt, synthetic construct
  source 1..10: mol_type = other RNA
  misc_feature 1..10: note = Description of sequence: Splice site sequence
gaggttggtt

SEQ ID NO: 2105 - RNA, 10 nt, synthetic construct
  source 1..10: mol_type = other RNA
  misc_feature 1..10: note = Description of sequence: Splice site sequence
gaggttgtag

SEQ ID NO: 2106 - RNA, 10 nt, synthetic construct
  source 1..10: mol_type = other RNA
  misc_feature 1..10: note = Description of sequence: Splice site sequence
gaggtttctg

SEQ ID NO: 2107 - RNA, 10 nt, synthetic construct
  source 1..10: mol_type = other RNA
  misc_feature 1..10: note = Description of sequence: Splice site sequence
gaggtttgag

SEQ ID NO: 2108 - RNA, 10 nt, synthetic construct
  source 1..10: mol_type = other RNA
  misc_feature 1..10: note = Description of sequence: Splice site sequence
gaggtttgga

SEQ ID NO: 2109 - RNA, 10 nt, synthetic construct
  source 1..10: mol_type = other RNA
  misc_feature 1..10: note = Description of sequence: Splice site sequence
gaggtttggg

SEQ ID NO: 2110 - RNA, 10 nt, synthetic construct
  source 1..10: mol_type = other RNA
  misc_feature 1..10: note = Description of sequence: Splice site sequence
gaggtttgta

SEQ ID NO: 2111 - RNA, 10 nt, synthetic construct
  source 1..10: mol_type = other RNA
  misc_feature 1..10: note = Description of sequence: Splice site sequence
gaggtttgtt

SEQ ID NO: 2112 - RNA, 10 nt, synthetic construct
  source 1..10: mol_type = other RNA
  misc_feature 1..10: note = Description of sequence: Splice site sequence
gaggttttca

SEQ ID NO: 2113 - RNA, 10 nt, synthetic construct
  source 1..10: mol_type = other RNA
  misc_feature 1..10: note = Description of sequence: Splice site sequence
gaggttttga

SEQ ID NO: 2114 - RNA, 10 nt, synthetic construct
  source 1..10: mol_type = other RNA
  misc_feature 1..10: note = Description of sequence: Splice site sequence
gaggttttgg

SEQ ID NO: 2115 - RNA, 10 nt, synthetic construct
  source 1..10: mol_type = other RNA
  misc_feature 1..10: note = Description of sequence: Splice site sequence
gaggttttta

SEQ ID NO: 2116 - RNA, 10 nt, synthetic construct
  source 1..10: mol_type = other RNA
  misc_feature 1..10: note = Description of sequence: Splice site sequence
gaggtttttc

SEQ ID NO: 2117 - RNA, 10 nt, synthetic construct
  source 1..10: mol_type = other RNA
  misc_feature 1..10: note = Description of sequence: Splice site sequence
gatgtaaaat

SEQ ID NO: 2118 - RNA, 10 nt, synthetic construct
  source 1..10: mol_type = other RNA
  misc_feature 1..10: note = Description of sequence: Splice site sequence
gatgtaagca

SEQ ID NO: 2119 - RNA, 10 nt, synthetic construct
  source 1..10: mol_type = other RNA
  misc_feature 1..10: note = Description of sequence: Splice site sequence
gatgtaagcc

SEQ ID NO: 2120 - RNA, 10 nt, synthetic construct
  source 1..10: mol_type = other RNA
  misc_feature 1..10: note = Description of sequence: Splice site sequence
gatgtaaggt

SEQ ID NO: 2121 - RNA, 10 nt, synthetic construct
  source 1..10: mol_type = other RNA
  misc_feature 1..10: note = Description of sequence: Splice site sequence
gatgtaagta

SEQ ID NO: 2122 - RNA, 10 nt, synthetic construct
  source 1..10: mol_type = other RNA
  misc_feature 1..10: note = Description of sequence: Splice site sequence
gatgtaagtg

SEQ ID NO: 2123 - RNA, 10 nt, synthetic construct
  source 1..10: mol_type = other RNA
  misc_feature 1..10: note = Description of sequence: Splice site sequence
gatgtaagtt

SEQ ID NO: 2124 - RNA, 10 nt, synthetic construct
  source 1..10: mol_type = other RNA
  misc_feature 1..10: note = Description of sequence: Splice site sequence
gatgtacatc

SEQ ID NO: 2125 - RNA, 10 nt, synthetic construct
  source 1..10: mol_type = other RNA
  misc_feature 1..10: note = Description of sequence: Splice site sequence
gatgtaggta

SEQ ID NO: 2126 - RNA, 10 nt, synthetic construct
  source 1..10: mol_type = other RNA
  misc_feature 1..10: note = Description of sequence: Splice site sequence
gatgtatggc

SEQ ID NO: 2127 - RNA, 10 nt, synthetic construct
  source 1..10: mol_type = other RNA
  misc_feature 1..10: note = Description of sequence: Splice site sequence
gatgtatgta

SEQ ID NO: 2128 - RNA, 10 nt, synthetic construct
  source 1..10: mol_type = other RNA
  misc_feature 1..10: note = Description of sequence: Splice site sequence
gatgtatgtt

SEQ ID NO: 2129 - RNA, 10 nt, synthetic construct
  source 1..10: mol_type = other RNA
  misc_feature 1..10: note = Description of sequence: Splice site sequence
gatgtcagtg

SEQ ID NO: 2130 - RNA, 10 nt, synthetic construct
  source 1..10: mol_type = other RNA
  misc_feature 1..10: note = Description of sequence: Splice site sequence
gatgtgagag

SEQ ID NO: 2131 - RNA, 10 nt, synthetic construct
  source 1..10: mol_type = other RNA
  misc_feature 1..10: note = Description of sequence: Splice site sequence
gatgtgagcc

SEQ ID NO: 2132 - RNA, 10 nt, synthetic construct
  source 1..10: mol_type = other RNA
  misc_feature 1..10: note = Description of sequence: Splice site sequence
gatgtgagct

SEQ ID NO: 2133 - RNA, 10 nt, synthetic construct
  source 1..10: mol_type = other RNA
  misc_feature 1..10: note = Description of sequence: Splice site sequence
gatgtgagga

SEQ ID NO: 2134 - RNA, 10 nt, synthetic construct
  source 1..10: mol_type = other RNA
  misc_feature 1..10: note = Description of sequence: Splice site sequence
gatgtgagtc

SEQ ID NO: 2135 - RNA, 10 nt, synthetic construct
  source 1..10: mol_type = other RNA
  misc_feature 1..10: note = Description of sequence: Splice site sequence
gatgtgagtg

SEQ ID NO: 2136 - RNA, 10 nt, synthetic construct
  source 1..10: mol_type = other RNA
  misc_feature 1..10: note = Description of sequence: Splice site sequence
gatgtgagtt

SEQ ID NO: 2137 - RNA, 10 nt, synthetic construct
  source 1..10: mol_type = other RNA
  misc_feature 1..10: note = Description of sequence: Splice site sequence
gatgtgggta

SEQ ID NO: 2138 - RNA, 10 nt, synthetic construct
  source 1..10: mol_type = other RNA
  misc_feature 1..10: note = Description of sequence: Splice site sequence
gatgtgggtg

SEQ ID NO: 2139 - RNA, 10 nt, synthetic construct
  source 1..10: mol_type = other RNA
  misc_feature 1..10: note = Description of sequence: Splice site sequence
gatgtgtgtt

SEQ ID NO: 2140 - RNA, 10 nt, synthetic construct
  source 1..10: mol_type = other RNA
  misc_feature 1..10: note = Description of sequence: Splice site sequence
gatgttagct

SEQ ID NO: 2141 - RNA, 10 nt, synthetic construct
  source 1..10: mol_type = other RNA
  misc_feature 1..10: note = Description of sequence: Splice site sequence
gatgttcagt

SEQ ID NO: 2142 - RNA, 10 nt, synthetic construct
  source 1..10: mol_type = other RNA
  misc_feature 1..10: note = Description of sequence: Splice site sequence
gatgttcgtg

SEQ ID NO: 2143 - RNA, 10 nt, synthetic construct
  source 1..10: mol_type = other RNA
  misc_feature 1..10: note = Description of sequence: Splice site sequence
gatgtttgtt

SEQ ID NO: 2144 - RNA, 10 nt, synthetic construct
  source 1..10: mol_type = other RNA
  misc_feature 1..10: note = Description of sequence: Splice site sequence
gcagtaaagg

SEQ ID NO: 2145 - RNA, 10 nt, synthetic construct
  source 1..10: mol_type = other RNA
  misc_feature 1..10: note = Description of sequence: Splice site sequence
gcagtaagaa

SEQ ID NO: 2146 - RNA, 10 nt, synthetic construct
  source 1..10: mol_type = other RNA
  misc_feature 1..10: note = Description of sequence: Splice site sequence
gcagtaagga

SEQ ID NO: 2147 - RNA, 10 nt, synthetic construct
  source 1..10: mol_type = other RNA
  misc_feature 1..10: note = Description of sequence: Splice site sequence
gcagtaagta

SEQ ID NO: 2148 - RNA, 10 nt, synthetic construct
  source 1..10: mol_type = other RNA
  misc_feature 1..10: note = Description of sequence: Splice site sequence
gcagtaagtc

SEQ ID NO: 2149 - RNA, 10 nt, synthetic construct
  source 1..10: mol_type = other RNA
  misc_feature 1..10: note = Description of sequence: Splice site sequence
gcagtaagtt

SEQ ID NO: 2150 - RNA, 10 nt, synthetic construct
  source 1..10: mol_type = other RNA
  misc_feature 1..10: note = Description of sequence: Splice site sequence
gcagtagatg

SEQ ID NO: 2151 - RNA, 10 nt, synthetic construct
  source 1..10: mol_type = other RNA
  misc_feature 1..10: note = Description of sequence: Splice site sequence
gcagtaggta

SEQ ID NO: 2152 - RNA, 10 nt, synthetic construct
  source 1..10: mol_type = other RNA
  misc_feature 1..10: note = Description of sequence: Splice site sequence
gcagtatgtg

SEQ ID NO: 2153 - RNA, 10 nt, synthetic construct
  source 1..10: mol_type = other RNA
  misc_feature 1..10: note = Description of sequence: Splice site sequence
gcagtatgtt

SEQ ID NO: 2154 - RNA, 10 nt, synthetic construct
  source 1..10: mol_type = other RNA
  misc_feature 1..10: note = Description of sequence: Splice site sequence
gcagtcagta

SEQ ID NO: 2155 - RNA, 10 nt, synthetic construct
  source 1..10: mol_type = other RNA
  misc_feature 1..10: note = Description of sequence: Splice site sequence
gcagtcagtg

SEQ ID NO: 2156 - RNA, 10 nt, synthetic construct
  source 1..10: mol_type = other RNA
  misc_feature 1..10: note = Description of sequence: Splice site sequence
gcagtccggt

SEQ ID NO: 2157 - RNA, 10 nt, synthetic construct
  source 1..10: mol_type = other RNA
  misc_feature 1..10: note = Description of sequence: Splice site sequence
gcagtgactt

SEQ ID NO: 2158 - RNA, 10 nt, synthetic construct
  source 1..10: mol_type = other RNA
  misc_feature 1..10: note = Description of sequence: Splice site sequence
gcagtgagcc

SEQ ID NO: 2159 - RNA, 10 nt, synthetic construct
  source 1..10: mol_type = other RNA
  misc_feature 1..10: note = Description of sequence: Splice site sequence
gcagtgagcg

SEQ ID NO: 2160 - RNA, 10 nt, synthetic construct
  source 1..10: mol_type = other RNA
  misc_feature 1..10: note = Description of sequence: Splice site sequence
gcagtgagct

SEQ ID NO: 2161 - RNA, 10 nt, synthetic construct
  source 1..10: mol_type = other RNA
  misc_feature 1..10: note = Description of sequence: Splice site sequence
gcagtgagta

SEQ ID NO: 2162 - RNA, 10 nt, synthetic construct
  source 1..10: mol_type = other RNA
  misc_feature 1..10: note = Description of sequence: Splice site sequence
gcagtgagtg

SEQ ID NO: 2163 - RNA, 10 nt, synthetic construct
  source 1..10: mol_type = other RNA
  misc_feature 1..10: note = Description of sequence: Splice site sequence
gcagtgagtt

SEQ ID NO: 2164 - RNA, 10 nt, synthetic construct
  source 1..10: mol_type = other RNA
  misc_feature 1..10: note = Description of sequence: Splice site sequence
gcagtgggta

SEQ ID NO: 2165 - RNA, 10 nt, synthetic construct
  source 1..10: mol_type = other RNA
  misc_feature 1..10: note = Description of sequence: Splice site sequence
gcagttaagt

SEQ ID NO: 2166 - RNA, 10 nt, synthetic construct
  source 1..10: mol_type = other RNA
  misc_feature 1..10: note = Description of sequence: Splice site sequence
gcagttgagt

SEQ ID NO: 2167 - RNA, 10 nt, synthetic construct
  source 1..10: mol_type = other RNA
  misc_feature 1..10: note = Description of sequence: Splice site sequence
gccgtaagtc

SEQ ID NO: 2168 - RNA, 10 nt, synthetic construct
  source 1..10: mol_type = other RNA
  misc_feature 1..10: note = Description of sequence: Splice site sequence
gccgtgagta

SEQ ID NO: 2169 - RNA, 10 nt, synthetic construct
  source 1..10: mol_type = other RNA
  misc_feature 1..10: note = Description of sequence: Splice site sequence
gcggtaaagc

SEQ ID NO: 2170 - RNA, 10 nt, synthetic construct
  source 1..10: mol_type = other RNA
  misc_feature 1..10: note = Description of sequence: Splice site sequence
gcggtaaata

SEQ ID NO: 2171 - RNA, 10 nt, synthetic construct
  source 1..10: mol_type = other RNA
  misc_feature 1..10: note = Description of sequence: Splice site sequence
gcggtaagct

SEQ ID NO: 2172 - RNA, 10 nt, synthetic construct
  source 1..10: mol_type = other RNA
  misc_feature 1..10: note = Description of sequence: Splice site sequence
gcggtaaggg

SEQ ID NO: 2173 - RNA, 10 nt, synthetic construct
  source 1..10: mol_type = other RNA
  misc_feature 1..10: note = Description of sequence: Splice site sequence
gcggtaagtg

SEQ ID NO: 2174 - RNA, 10 nt, synthetic construct
  source 1..10: mol_type = other RNA
  misc_feature 1..10: note = Description of sequence: Splice site sequence
gcggtaatca

SEQ ID NO: 2175 - RNA, 10 nt, synthetic construct
  source 1..10: mol_type = other RNA
  misc_feature 1..10: note = Description of sequence: Splice site sequence
gcggtacgta

SEQ ID NO: 2176 - RNA, 10 nt, synthetic construct
  source 1..10: mol_type = other RNA
  misc_feature 1..10: note = Description of sequence: Splice site sequence
gcggtacttg

SEQ ID NO: 2177 - RNA, 10 nt, synthetic construct
  source 1..10: mol_type = other RNA
  misc_feature 1..10: note = Description of sequence: Splice site sequence
gcggtagggt

SEQ ID NO: 2178 - RNA, 10 nt, synthetic construct
  source 1..10: mol_type = other RNA
  misc_feature 1..10: note = Description of sequence: Splice site sequence
gcggtagtgt

SEQ ID NO: 2179 - RNA, 10 nt, synthetic construct
  source 1..10: mol_type = other RNA
  misc_feature 1..10: note = Description of sequence: Splice site sequence
gcggtgagca

SEQ ID NO: 2180 - RNA, 10 nt, synthetic construct
  source 1..10: mol_type = other RNA
  misc_feature 1..10: note = Description of sequence: Splice site sequence
gcggtgagct

SEQ ID NO: 2181 - RNA, 10 nt, synthetic construct
  source 1..10: mol_type = other RNA
  misc_feature 1..10: note = Description of sequence: Splice site sequence
gcggtgagtt

SEQ ID NO: 2182 - RNA, 10 nt, synthetic construct
  source 1..10: mol_type = other RNA
  misc_feature 1..10: note = Description of sequence: Splice site sequence
gcggtggctc

SEQ ID NO: 2183 - RNA, 10 nt, synthetic construct
  source 1..10: mol_type = other RNA
  misc_feature 1..10: note = Description of sequence: Splice site sequence
gcggtgtgca

SEQ ID NO: 2184 - RNA, 10 nt, synthetic construct
  source 1..10: mol_type = other RNA
  misc_feature 1..10: note = Description of sequence: Splice site sequence
gcggtgtgtt

SEQ ID NO: 2185 - RNA, 10 nt, synthetic construct
  source 1..10: mol_type = other RNA
  misc_feature 1..10: note = Description of sequence: Splice site sequence
gcggttaagt

SEQ ID NO: 2186 - RNA, 10 nt, synthetic construct
  source 1..10: mol_type = other RNA
  misc_feature 1..10: note = Description of sequence: Splice site sequence
gcggtttgca

SEQ ID NO: 2187 - RNA, 10 nt, synthetic construct
  source 1..10: mol_type = other RNA
  misc_feature 1..10: note = Description of sequence: Splice site sequence
gctgctgtaa

SEQ ID NO: 2188 - RNA, 10 nt, synthetic construct
  source 1..10: mol_type = other RNA
  misc_feature 1..10: note = Description of sequence: Splice site sequence
gctgtaaata

SEQ ID NO: 2189 - RNA, 10 nt, synthetic construct
  source 1..10: mol_type = other RNA
  misc_feature 1..10: note = Description of sequence: Splice site sequence
gctgtaagac

SEQ ID NO: 2190 - RNA, 10 nt, synthetic construct
  source 1..10: mol_type = other RNA
  misc_feature 1..10: note = Description of sequence: Splice site sequence
gctgtaagag

SEQ ID NO: 2191 - RNA, 10 nt, synthetic construct
  source 1..10: mol_type = other RNA
  misc_feature 1..10: note = Description of sequence: Splice site sequence
gctgtaagca

SEQ ID NO: 2192 - RNA, 10 nt, synthetic construct
  source 1..10: mol_type = other RNA
  misc_feature 1..10: note = Description of sequence: Splice site sequence
gctgtaagga

SEQ ID NO: 2193 - RNA, 10 nt, synthetic construct
  source 1..10: mol_type = other RNA
  misc_feature 1..10: note = Description of sequence: Splice site sequence
gctgtaagta

SEQ ID NO: 2194 - RNA, 10 nt, synthetic construct
  source 1..10: mol_type = other RNA
  misc_feature 1..10: note = Description of sequence: Splice site sequence
gctgtaagtc

SEQ ID NO: 2195 - RNA, 10 nt, synthetic construct
  source 1..10: mol_type = other RNA
  misc_feature 1..10: note = Description of sequence: Splice site sequence
gctgtaagtg

SEQ ID NO: 2196 - RNA, 10 nt, synthetic construct
  source 1..10: mol_type = other RNA
  misc_feature 1..10: note = Description of sequence: Splice site sequence
gctgtaagtt

SEQ ID NO: 2197 - RNA, 10 nt, synthetic construct
  source 1..10: mol_type = other RNA
  misc_feature 1..10: note = Description of sequence: Splice site sequence
gctgtaggtg

SEQ ID NO: 2198 - RNA, 10 nt, synthetic construct
  source 1..10: mol_type = other RNA
  misc_feature 1..10: note = Description of sequence: Splice site sequence
gctgtatggt

SEQ ID NO: 2199 - RNA, 10 nt, synthetic construct
  source 1..10: mol_type = other RNA
  misc_feature 1..10: note = Description of sequence: Splice site sequence
gctgtcagtg

SEQ ID NO: 2200 - RNA, 10 nt, synthetic construct
  source 1..10: mol_type = other RNA
  misc_feature 1..10: note = Description of sequence: Splice site sequence
gctgtccttg

SEQ ID NO: 2201 - RNA, 10 nt, synthetic construct
  source 1..10: mol_type = other RNA
  misc_feature 1..10: note = Description of sequence: Splice site sequence
gctgtgagaa

SEQ ID NO: 2202 - RNA, 10 nt, synthetic construct
  source 1..10: mol_type = other RNA
  misc_feature 1..10: note = Description of sequence: Splice site sequence
gctgtgagcc

SEQ ID NO: 2203 - RNA, 10 nt, synthetic construct
  source 1..10: mol_type = other RNA
  misc_feature 1..10: note = Description of sequence: Splice site sequence
gctgtgagga

SEQ ID NO: 2204 - RNA, 10 nt, synthetic construct
  source 1..10: mol_type = other RNA
  misc_feature 1..10: note = Description of sequence: Splice site sequence
gctgtgagta

SEQ ID NO: 2205 - RNA, 10 nt, synthetic construct
  source 1..10: mol_type = other RNA
  misc_feature 1..10: note = Description of sequence: Splice site sequence
gctgtgagtc

SEQ ID NO: 2206 - RNA, 10 nt, synthetic construct
  source 1..10: mol_type = other RNA
  misc_feature 1..10: note = Description of sequence: Splice site sequence
gctgtgagtg

SEQ ID NO: 2207 - RNA, 10 nt, synthetic construct
  source 1..10: mol_type = other RNA
  misc_feature 1..10: note = Description of sequence: Splice site sequence
gctgtgagtt

SEQ ID NO: 2208 - RNA, 10 nt, synthetic construct
  source 1..10: mol_type = other RNA
  misc_feature 1..10: note = Description of sequence: Splice site sequence
gctgtgggtt

SEQ ID NO: 2209 - RNA, 10 nt, synthetic construct
  source 1..10: mol_type = other RNA
  misc_feature 1..10: note = Description of sequence: Splice site sequence
ggagtaagag

SEQ ID NO: 2210 - RNA, 10 nt, synthetic construct
  source 1..10: mol_type = other RNA
  misc_feature 1..10: note = Description of sequence: Splice site sequence
ggagtaagca

SEQ ID NO: 2211 - RNA, 10 nt, synthetic construct
  source 1..10: mol_type = other RNA
  misc_feature 1..10: note = Description of sequence: Splice site sequence
ggagtaagcc

SEQ ID NO: 2212 - RNA, 10 nt, synthetic construct
  source 1..10: mol_type = other RNA
  misc_feature 1..10: note = Description of sequence: Splice site sequence
ggagtaagct

SEQ ID NO: 2213 - RNA, 10 nt, synthetic construct
  source 1..10: mol_type = other RNA
  misc_feature 1..10: note = Description of sequence: Splice site sequence
ggagtaagga

SEQ ID NO: 2214 - RNA, 10 nt, synthetic construct
  source 1..10: mol_type = other RNA
  misc_feature 1..10: note = Description of sequence: Splice site sequence
ggagtaagtg

SEQ ID NO: 2215 - RNA, 10 nt, synthetic construct
  source 1..10: mol_type = other RNA
  misc_feature 1..10: note = Description of sequence: Splice site sequence
ggagtaagtt

SEQ ID NO: 2216 - RNA, 10 nt, synthetic construct
  source 1..10: mol_type = other RNA
  misc_feature 1..10: note = Description of sequence: Splice site sequence
ggagtaattt

SEQ ID NO: 2217 - RNA, 10 nt, synthetic construct
  source 1..10: mol_type = other RNA
  misc_feature 1..10: note = Description of sequence: Splice site sequence
ggagtactgt

SEQ ID NO: 2218 - RNA, 10 nt, synthetic construct
  source 1..10: mol_type = other RNA
  misc_feature 1..10: note = Description of sequence: Splice site sequence
ggagtaggaa

SEQ ID NO: 2219 - RNA, 10 nt, synthetic construct
  source 1..10: mol_type = other RNA
  misc_feature 1..10: note = Description of sequence: Splice site sequence
ggagtaggta

SEQ ID NO: 2220 - RNA, 10 nt, synthetic construct
  source 1..10: mol_type = other RNA
  misc_feature 1..10: note = Description of sequence: Splice site sequence
ggagtaggtt

SEQ ID NO: 2221 - RNA, 10 nt, synthetic construct
  source 1..10: mol_type = other RNA
  misc_feature 1..10: note = Description of sequence: Splice site sequence
ggagtagtat

SEQ ID NO: 2222 - RNA, 10 nt, synthetic construct
  source 1..10: mol_type = other RNA
  misc_feature 1..10: note = Description of sequence: Splice site sequence
ggagtatgac

SEQ ID NO: 2223 - RNA, 10 nt, synthetic construct
  source 1..10: mol_type = other RNA
  misc_feature 1..10: note = Description of sequence: Splice site sequence
ggagtatggt

SEQ ID NO: 2224 - RNA, 10 nt, synthetic construct
  source 1..10: mol_type = other RNA
  misc_feature 1..10: note = Description of sequence: Splice site sequence
ggagtcaagt

SEQ ID NO: 2225 - RNA, 10 nt, synthetic construct
  source 1..10: mol_type = other RNA
  misc_feature 1..10: note = Description of sequence: Splice site sequence
ggagtgaggg

SEQ ID NO: 2226 - RNA, 10 nt, synthetic construct
  source 1..10: mol_type = other RNA
  misc_feature 1..10: note = Description of sequence: Splice site sequence
ggagtgagta

SEQ ID NO: 2227 - RNA, 10 nt, synthetic construct
  source 1..10: mol_type = other RNA
  misc_feature 1..10: note = Description of sequence: Splice site sequence
ggagtgagtc

SEQ ID NO: 2228 - RNA, 10 nt, synthetic construct
  source 1..10: mol_type = other RNA
  misc_feature 1..10: note = Description of sequence: Splice site sequence
ggagtgagtg

SEQ ID NO: 2229 - RNA, 10 nt, synthetic construct
  source 1..10: mol_type = other RNA
  misc_feature 1..10: note = Description of sequence: Splice site sequence
ggagtgagtt

SEQ ID NO: 2230 - RNA, 10 nt, synthetic construct
  source 1..10: mol_type = other RNA
  misc_feature 1..10: note = Description of sequence: Splice site sequence
ggagtgcttt

SEQ ID NO: 2231 - RNA, 10 nt, synthetic construct
  source 1..10: mol_type = other RNA
  misc_feature 1..10: note = Description of sequence: Splice site sequence
ggagtgggca

SEQ ID NO: 2232 - RNA, 10 nt, synthetic construct
  source 1..10: mol_type = other RNA
  misc_feature 1..10: note = Description of sequence: Splice site sequence
ggagtgggtg

SEQ ID NO: 2233 - RNA, 10 nt, synthetic construct
  source 1..10: mol_type = other RNA
  misc_feature 1..10: note = Description of sequence: Splice site sequence
ggagttaagg

SEQ ID NO: 2234 - RNA, 10 nt, synthetic construct
  source 1..10: mol_type = other RNA
  misc_feature 1..10: note = Description of sequence: Splice site sequence
ggagttgaga

SEQ ID NO: 2235 - RNA, 10 nt, synthetic construct
  source 1..10: mol_type = other RNA
  misc_feature 1..10: note = Description of sequence: Splice site sequence
ggcgtaagcc

SEQ ID NO: 2236 - RNA, 10 nt, synthetic construct
  source 1..10: mol_type = other RNA
  misc_feature 1..10: note = Description of sequence: Splice site sequence
ggcgtaggta

SEQ ID NO: 2237 - RNA, 10 nt, synthetic construct
  source 1..10: mol_type = other RNA
  misc_feature 1..10: note = Description of sequence: Splice site sequence
ggcgtaggtg

SEQ ID NO: 2238 - RNA, 10 nt, synthetic construct
  source 1..10: mol_type = other RNA
  misc_feature 1..10: note = Description of sequence: Splice site sequence
ggcgtgagcc

SEQ ID NO: 2239 - RNA, 10 nt, synthetic construct
  source 1..10: mol_type = other RNA
  misc_feature 1..10: note = Description of sequence: Splice site sequence
ggcgtgagtc

SEQ ID NO: 2240 - RNA, 10 nt, synthetic construct
  source 1..10: mol_type = other RNA
  misc_feature 1..10: note = Description of sequence: Splice site sequence
ggggtaaaca

SEQ ID NO: 2241 - RNA, 10 nt, synthetic construct
  source 1..10: mol_type = other RNA
  misc_feature 1..10: note = Description of sequence: Splice site sequence
ggggtaaacc

SEQ ID NO: 2242 - RNA, 10 nt, synthetic construct
  source 1..10: mol_type = other RNA
  misc_feature 1..10: note = Description of sequence: Splice site sequence
ggggtaaact

SEQ ID NO: 2243 - RNA, 10 nt, synthetic construct
  source 1..10: mol_type = other RNA
  misc_feature 1..10: note = Description of sequence: Splice site sequence
ggggtaagaa

SEQ ID NO: 2244 - RNA, 10 nt, synthetic construct
  source 1..10: mol_type = other RNA
  misc_feature 1..10: note = Description of sequence: Splice site sequence
ggggtaagag

SEQ ID NO: 2245 - RNA, 10 nt, synthetic construct
  source 1..10: mol_type = other RNA
  misc_feature 1..10: note = Description of sequence: Splice site sequence
ggggtaagat

SEQ ID NO: 2246 - RNA, 10 nt, synthetic construct
  source 1..10: mol_type = other RNA
  misc_feature 1..10: note = Description of sequence: Splice site sequence
ggggtaagca

SEQ ID NO: 2247 - RNA, 10 nt, synthetic construct
  source 1..10: mol_type = other RNA
  misc_feature 1..10: note = Description of sequence: Splice site sequence
ggggtaagcc

SEQ ID NO: 2248 - RNA, 10 nt, synthetic construct
  source 1..10: mol_type = other RNA
  misc_feature 1..10: note = Description of sequence: Splice site sequence
ggggtaagct

SEQ ID NO: 2249 - RNA, 10 nt, synthetic construct
  source 1..10: mol_type = other RNA
  misc_feature 1..10: note = Description of sequence: Splice site sequence
ggggtaagga

SEQ ID NO: 2250 - RNA, 10 nt, synthetic construct
  source 1..10: mol_type = other RNA
  misc_feature 1..10: note = Description of sequence: Splice site sequence
ggggtaaggg

SEQ ID NO: 2251 - RNA, 10 nt, synthetic construct
  source 1..10: mol_type = other RNA
  misc_feature 1..10: note = Description of sequence: Splice site sequence
ggggtaagta

SEQ ID NO: 2252 - RNA, 10 nt, synthetic construct
  source 1..10: mol_type = other RNA
  misc_feature 1..10: note = Description of sequence: Splice site sequence
ggggtaagtg

SEQ ID NO: 2253 - RNA, 10 nt, synthetic construct
  source 1..10: mol_type = other RNA
  misc_feature 1..10: note = Description of sequence: Splice site sequence
ggggtaagtt

SEQ ID NO: 2254 - RNA, 10 nt, synthetic construct
  source 1..10: mol_type = other RNA
  misc_feature 1..10: note = Description of sequence: Splice site sequence
ggggtagaca

SEQ ID NO: 2255 - RNA, 10 nt, synthetic construct
  source 1..10: mol_type = other RNA
  misc_feature 1..10: note = Description of sequence: Splice site sequence
ggggtaggag

SEQ ID NO: 2256 - RNA, 10 nt, synthetic construct
  source 1..10: mol_type = other RNA
  misc_feature 1..10: note = Description of sequence: Splice site sequence
ggggtaggcc

SEQ ID NO: 2257 - RNA, 10 nt, synthetic construct
  source 1..10: mol_type = other RNA
  misc_feature 1..10: note = Description of sequence: Splice site sequence
ggggtaggga

SEQ ID NO: 2258 - RNA, 10 nt, synthetic construct
  source 1..10: mol_type = other RNA
  misc_feature 1..10: note = Description of sequence: Splice site sequence
ggggtaggta

SEQ ID NO: 2259 - RNA, 10 nt, synthetic construct
  source 1..10: mol_type = other RNA
  misc_feature 1..10: note = Description of sequence: Splice site sequence
ggggtaggtg

SEQ ID NO: 2260 - RNA, 10 nt, synthetic construct
  source 1..10: mol_type = other RNA
  misc_feature 1..10: note = Description of sequence: Splice site sequence
ggggtaggtt

SEQ ID NO: 2261 - RNA, 10 nt, synthetic construct
  source 1..10: mol_type = other RNA
  misc_feature 1..10: note = Description of sequence: Splice site sequence
ggggtagtgc

SEQ ID NO: 2262 - RNA, 10 nt, synthetic construct
  source 1..10: mol_type = other RNA
  misc_feature 1..10: note = Description of sequence: Splice site sequence
ggggtatctg

SEQ ID NO: 2263 - RNA, 10 nt, synthetic construct
  source 1..10: mol_type = other RNA
  misc_feature 1..10: note = Description of sequence: Splice site sequence
ggggtatgac

SEQ ID NO: 2264 - RNA, 10 nt, synthetic construct
  source 1..10: mol_type = other RNA
  misc_feature 1..10: note = Description of sequence: Splice site sequence
ggggtatgga

SEQ ID NO: 2265 - RNA, 10 nt, synthetic construct
  source 1..10: mol_type = other RNA
  misc_feature 1..10: note = Description of sequence: Splice site sequence
ggggtatgta

SEQ ID NO: 2266 - RNA, 10 nt, synthetic construct
  source 1..10: mol_type = other RNA
  misc_feature 1..10: note = Description of sequence: Splice site sequence
ggggtatgtc

SEQ ID NO: 2267 - RNA, 10 nt, synthetic construct
  source 1..10: mol_type = other RNA
  misc_feature 1..10: note = Description of sequence: Splice site sequence
ggggtatgtg

SEQ ID NO: 2268 - RNA, 10 nt, synthetic construct
  source 1..10: mol_type = other RNA
  misc_feature 1..10: note = Description of sequence: Splice site sequence
ggggtatgtt

SEQ ID NO: 2269 - RNA, 10 nt, synthetic construct
  source 1..10: mol_type = other RNA
  misc_feature 1..10: note = Description of sequence: Splice site sequence
ggggtcagta

SEQ ID NO: 2270 - RNA, 10 nt, synthetic construct
  source 1..10: mol_type = other RNA
  misc_feature 1..10: note = Description of sequence: Splice site sequence
ggggtccgtg

SEQ ID NO: 2271 - RNA, 10 nt, synthetic construct
  source 1..10: mol_type = other RNA
  misc_feature 1..10: note = Description of sequence: Splice site sequence
ggggtcggag

SEQ ID NO: 2272 - RNA, 10 nt, synthetic construct
  source 1..10: mol_type = other RNA
  misc_feature 1..10: note = Description of sequence: Splice site sequence
ggggtctgtg

SEQ ID NO: 2273 - RNA, 10 nt, synthetic construct
  source 1..10: mol_type = other RNA
  misc_feature 1..10: note = Description of sequence: Splice site sequence
ggggtgaaca

SEQ ID NO: 2274 - RNA, 10 nt, synthetic construct
  source 1..10: mol_type = other RNA
  misc_feature 1..10: note = Description of sequence: Splice site sequence
ggggtgaaga

SEQ ID NO: 2275 - RNA, 10 nt, synthetic construct
  source 1..10: mol_type = other RNA
  misc_feature 1..10: note = Description of sequence: Splice site sequence
ggggtgagaa

SEQ ID NO: 2276 - RNA, 10 nt, synthetic construct
  source 1..10: mol_type = other RNA
  misc_feature 1..10: note = Description of sequence: Splice site sequence
ggggtgagat

SEQ ID NO: 2277 - RNA, 10 nt, synthetic construct
  source 1..10: mol_type = other RNA
  misc_feature 1..10: note = Description of sequence: Splice site sequence
ggggtgagcc

SEQ ID NO: 2278 - RNA, 10 nt, synthetic construct
  source 1..10: mol_type = other RNA
  misc_feature 1..10: note = Description of sequence: Splice site sequence
ggggtgagcg

SEQ ID NO: 2279 - RNA, 10 nt, synthetic construct
  source 1..10: mol_type = other RNA
  misc_feature 1..10: note = Description of sequence: Splice site sequence
ggggtgagct

SEQ ID NO: 2280 - RNA, 10 nt, synthetic construct
  source 1..10: mol_type = other RNA
  misc_feature 1..10: note = Description of sequence: Splice site sequence
ggggtgagga

SEQ ID NO: 2281 - RNA, 10 nt, synthetic construct
  source 1..10: mol_type = other RNA
  misc_feature 1..10: note = Description of sequence: Splice site sequence
ggggtgaggc

SEQ ID NO: 2282 - RNA, 10 nt, synthetic construct
  source 1..10: mol_type = other RNA
  misc_feature 1..10: note = Description of sequence: Splice site sequence
ggggtgaggg

SEQ ID NO: 2283 - RNA, 10 nt, synthetic construct
  source 1..10: mol_type = other RNA
  misc_feature 1..10: note = Description of sequence: Splice site sequence
ggggtgagtc

SEQ ID NO: 2284 - RNA, 10 nt, synthetic construct
  source 1..10: mol_type = other RNA
  misc_feature 1..10: note = Description of sequence: Splice site sequence
ggggtgagtg

SEQ ID NO: 2285 - RNA, 10 nt, synthetic construct
  source 1..10: mol_type = other RNA
  misc_feature 1..10: note = Description of sequence: Splice site sequence
ggggtgagtt

SEQ ID NO: 2286 - RNA, 10 nt, synthetic construct
  source 1..10: mol_type = other RNA
  misc_feature 1..10: note = Description of sequence: Splice site sequence
ggggtgcgta

SEQ ID NO: 2287 - RNA, 10 nt, synthetic construct
  source 1..10: mol_type = other RNA
  misc_feature 1..10: note = Description of sequence: Splice site sequence
ggggtggggt

SEQ ID NO: 2288 - RNA, 10 nt, synthetic construct
  source 1..10: mol_type = other RNA
  misc_feature 1..10: note = Description of sequence: Splice site sequence
ggggtgggta

SEQ ID NO: 2289 - RNA, 10 nt, synthetic construct
  source 1..10: mol_type = other RNA
  misc_feature 1..10: note = Description of sequence: Splice site sequence
ggggtgggtg

SEQ ID NO: 2290 - RNA, 10 nt, synthetic construct
  source 1..10: mol_type = other RNA
  misc_feature 1..10: note = Description of sequence: Splice site sequence
ggggtgggtt

SEQ ID NO: 2291 - RNA, 10 nt, synthetic construct
  source 1..10: mol_type = other RNA
  misc_feature 1..10: note = Description of sequence: Splice site sequence
ggggtgtgcg

SEQ ID NO: 2292 - RNA, 10 nt, synthetic construct
  source 1..10: mol_type = other RNA
  misc_feature 1..10: note = Description of sequence: Splice site sequence
ggggtgtgta

SEQ ID NO: 2293 - RNA, 10 nt, synthetic construct
  source 1..10: mol_type = other RNA
  misc_feature 1..10: note = Description of sequence: Splice site sequence
ggggtgtgtc

SEQ ID NO: 2294 - RNA, 10 nt, synthetic construct
  source 1..10: mol_type = other RNA
  misc_feature 1..10: note = Description of sequence: Splice site sequence
ggggtgtgtg

SEQ ID NO: 2295 - RNA, 10 nt, synthetic construct
  source 1..10: mol_type = other RNA
  misc_feature 1..10: note = Description of sequence: Splice site sequence
ggggttacag

SEQ ID NO: 2296 - RNA, 10 nt, synthetic construct
  source 1..10: mol_type = other RNA
  misc_feature 1..10: note = Description of sequence: Splice site sequence
ggggttggac

SEQ ID NO: 2297 - RNA, 10 nt, synthetic construct
  source 1..10: mol_type = other RNA
  misc_feature 1..10: note = Description of sequence: Splice site sequence
ggggttggga

SEQ ID NO: 2298 - RNA, 10 nt, synthetic construct
  source 1..10: mol_type = other RNA
  misc_feature 1..10: note = Description of sequence: Splice site sequence
ggggtttgcc

SEQ ID NO: 2299 - RNA, 10 nt, synthetic construct
  source 1..10: mol_type = other RNA
  misc_feature 1..10: note = Description of sequence: Splice site sequence
ggggtttgta

SEQ ID NO: 2300 - RNA, 10 nt, synthetic construct
  source 1..10: mol_type = other RNA
  misc_feature 1..10: note = Description of sequence: Splice site sequence
ggtgtaagaa

SEQ ID NO: 2301 - RNA, 10 nt, synthetic construct
  source 1..10: mol_type = other RNA
  misc_feature 1..10: note = Description of sequence: Splice site sequence
ggtgtaagat

SEQ ID NO: 2302 - RNA, 10 nt, synthetic construct
  source 1..10: mol_type = other RNA
  misc_feature 1..10: note = Description of sequence: Splice site sequence
ggtgtaagca

SEQ ID NO: 2303 - RNA, 10 nt, synthetic construct
  source 1..10: mol_type = other RNA
  misc_feature 1..10: note = Description of sequence: Splice site sequence
ggtgtaagcc

SEQ ID NO: 2304 - RNA, 10 nt, synthetic construct
  source 1..10: mol_type = other RNA
  misc_feature 1..10: note = Description of sequence: Splice site sequence
ggtgtaagcg

SEQ ID NO: 2305 - RNA, 10 nt, synthetic construct
  source 1..10: mol_type = other RNA
  misc_feature 1..10: note = Description of sequence: Splice site sequence
ggtgtaagtc

SEQ ID NO: 2306 - RNA, 10 nt, synthetic construct
  source 1..10: mol_type = other RNA
  misc_feature 1..10: note = Description of sequence: Splice site sequence
ggtgtaagtg

SEQ ID NO: 2307 - RNA, 10 nt, synthetic construct
  source 1..10: mol_type = other RNA
  misc_feature 1..10: note = Description of sequence: Splice site sequence
ggtgtaggtc

SEQ ID NO: 2308 - RNA, 10 nt, synthetic construct
  source 1..10: mol_type = other RNA
  misc_feature 1..10: note = Description of sequence: Splice site sequence
ggtgtaggtg

SEQ ID NO: 2309 - RNA, 10 nt, synthetic construct
  source 1..10: mol_type = other RNA
  misc_feature 1..10: note = Description of sequence: Splice site sequence
ggtgtaggtt

SEQ ID NO: 2310 - RNA, 10 nt, synthetic construct
  source 1..10: mol_type = other RNA
  misc_feature 1..10: note = Description of sequence: Splice site sequence
ggtgtccgta

SEQ ID NO: 2311 - RNA, 10 nt, synthetic construct
  source 1..10: mol_type = other RNA
  misc_feature 1..10: note = Description of sequence: Splice site sequence
ggtgtgagag

SEQ ID NO: 2312 - RNA, 10 nt, synthetic construct
  source 1..10: mol_type = other RNA
  misc_feature 1..10: note = Description of sequence: Splice site sequence
ggtgtgagcc

SEQ ID NO: 2313 - RNA, 10 nt, synthetic construct
  source 1..10: mol_type = other RNA
  misc_feature 1..10: note = Description of sequence: Splice site sequence
ggtgtgagct

SEQ ID NO: 2314 - RNA, 10 nt, synthetic construct
  source 1..10: mol_type = other RNA
  misc_feature 1..10: note = Description of sequence: Splice site sequence
ggtgtgagta

SEQ ID NO: 2315 - RNA, 10 nt, synthetic construct
  source 1..10: mol_type = other RNA
  misc_feature 1..10: note = Description of sequence: Splice site sequence
ggtgtgagtc

SEQ ID NO: 2316 - RNA, 10 nt, synthetic construct
  source 1..10: mol_type = other RNA
  misc_feature 1..10: note = Description of sequence: Splice site sequence
ggtgtgcttc

SEQ ID NO: 2317 - RNA, 10 nt, synthetic construct
  source 1..10: mol_type = other RNA
  misc_feature 1..10: note = Description of sequence: Splice site sequence
ggtgtggctg

SEQ ID NO: 2318 - RNA, 10 nt, synthetic construct
  source 1..10: mol_type = other RNA
  misc_feature 1..10: note = Description of sequence: Splice site sequence
ggtgtggtga

SEQ ID NO: 2319 - RNA, 10 nt, synthetic construct
  source 1..10: mol_type = other RNA
  misc_feature 1..10: note = Description of sequence: Splice site sequence
ggtgtgtctg

SEQ ID NO: 2320 - RNA, 10 nt, synthetic construct
  source 1..10: mol_type = other RNA
  misc_feature 1..10: note = Description of sequence: Splice site sequence
ggtgttgaaa

SEQ ID NO: 2321 - RNA, 10 nt, synthetic construct
  source 1..10: mol_type = other RNA
  misc_feature 1..10: note = Description of sequence: Splice site sequence
ggtgttgctg

SEQ ID NO: 2322 - RNA, 10 nt, synthetic construct
  source 1..10: mol_type = other RNA
  misc_feature 1..10: note = Description of sequence: Splice site sequence
gtagtaagat

SEQ ID NO: 2323 - RNA, 10 nt, synthetic construct
  source 1..10: mol_type = other RNA
  misc_feature 1..10: note = Description of sequence: Splice site sequence
gtagtaagta

SEQ ID NO: 2324 - RNA, 10 nt, synthetic construct
  source 1..10: mol_type = other RNA
  misc_feature 1..10: note = Description of sequence: Splice site sequence
gtagtaagtg

SEQ ID NO: 2325 - RNA, 10 nt, synthetic construct
  source 1..10: mol_type = other RNA
  misc_feature 1..10: note = Description of sequence: Splice site sequence
gtagtagctt

SEQ ID NO: 2326 - RNA, 10 nt, synthetic construct
  source 1..10: mol_type = other RNA
  misc_feature 1..10: note = Description of sequence: Splice site sequence
gtagtaggta

SEQ ID NO: 2327 - RNA, 10 nt, synthetic construct
  source 1..10: mol_type = other RNA
  misc_feature 1..10: note = Description of sequence: Splice site sequence
gtagtcagta

SEQ ID NO: 2328 - RNA, 10 nt, synthetic construct
  source 1..10: mol_type = other RNA
  misc_feature 1..10: note = Description of sequence: Splice site sequence
gtagtgagta

SEQ ID NO: 2329 - RNA, 10 nt, synthetic construct
  source 1..10: mol_type = other RNA
  misc_feature 1..10: note = Description of sequence: Splice site sequence
gtagtggtgg

SEQ ID NO: 2330 - RNA, 10 nt, synthetic construct
  source 1..10: mol_type = other RNA
  misc_feature 1..10: note = Description of sequence: Splice site sequence
gtagttaagt

SEQ ID NO: 2331 - RNA, 10 nt, synthetic construct
  source 1..10: mol_type = other RNA
  misc_feature 1..10: note = Description of sequence: Splice site sequence
gtagtttctg

SEQ ID NO: 2332 - RNA, 10 nt, synthetic construct
  source 1..10: mol_type = other RNA
  misc_feature 1..10: note = Description of sequence: Splice site sequence
gtcgtaagtg

SEQ ID NO: 2333 - RNA, 10 nt, synthetic construct
  source 1..10: mol_type = other RNA
  misc_feature 1..10: note = Description of sequence: Splice site sequence
gtcgtgagtg

SEQ ID NO: 2334 - RNA, 10 nt, synthetic construct
  source 1..10: mol_type = other RNA
  misc_feature 1..10: note = Description of sequence: Splice site sequence
gtcgtgagtt

SEQ ID NO: 2335 - RNA, 10 nt, synthetic construct
  source 1..10: mol_type = other RNA
  misc_feature 1..10: note = Description of sequence: Splice site sequence
gtggcaagta

SEQ ID NO: 2336 - RNA, 10 nt, synthetic construct
  source 1..10: mol_type = other RNA
  misc_feature 1..10: note = Description of sequence: Splice site sequence
gtggcttgta

SEQ ID NO: 2337 - RNA, 10 nt, synthetic construct
  source 1..10: mol_type = other RNA
  misc_feature 1..10: note = Description of sequence: Splice site sequence
gtggtaaaat

SEQ ID NO: 2338 - RNA, 10 nt, synthetic construct
  source 1..10: mol_type = other RNA
  misc_feature 1..10: note = Description of sequence: Splice site sequence
gtggtaaaga

SEQ ID NO: 2339 - RNA, 10 nt, synthetic construct
  source 1..10: mol_type = other RNA
  misc_feature 1..10: note = Description of sequence: Splice site sequence
gtggtaaatt

SEQ ID NO: 2340 - RNA, 10 nt, synthetic construct
  source 1..10: mol_type = other RNA
  misc_feature 1..10: note = Description of sequence: Splice site sequence
gtggtaacat

SEQ ID NO: 2341 - RNA, 10 nt, synthetic construct
  source 1..10: mol_type = other RNA
  misc_feature 1..10: note = Description of sequence: Splice site sequence
gtggtaacta

SEQ ID NO: 2342 - RNA, 10 nt, synthetic construct
  source 1..10: mol_type = other RNA
  misc_feature 1..10: note = Description of sequence: Splice site sequence
gtggtaagaa

SEQ ID NO: 2343 - RNA, 10 nt, synthetic construct
  source 1..10: mol_type = other RNA
  misc_feature 1..10: note = Description of sequence: Splice site sequence
gtggtaagac

SEQ ID NO: 2344 - RNA, 10 nt, synthetic construct
  source 1..10: mol_type = other RNA
  misc_feature 1..10: note = Description of sequence: Splice site sequence
gtggtaagag

SEQ ID NO: 2345 - RNA, 10 nt, synthetic construct
  source 1..10: mol_type = other RNA
  misc_feature 1..10: note = Description of sequence: Splice site sequence
gtggtaagat

SEQ ID NO: 2346 - RNA, 10 nt, synthetic construct
  source 1..10: mol_type = other RNA
  misc_feature 1..10: note = Description of sequence: Splice site sequence
gtggtaagca

SEQ ID NO: 2347 - RNA, 10 nt, synthetic construct
  source 1..10: mol_type = other RNA
  misc_feature 1..10: note = Description of sequence: Splice site sequence
gtggtaagcg

SEQ ID NO: 2348 - RNA, 10 nt, synthetic construct
  source 1..10: mol_type = other RNA
  misc_feature 1..10: note = Description of sequence: Splice site sequence
gtggtaagct

SEQ ID NO: 2349 - RNA, 10 nt, synthetic construct
  source 1..10: mol_type = other RNA
  misc_feature 1..10: note = Description of sequence: Splice site sequence
gtggtaagga

SEQ ID NO: 2350 - RNA, 10 nt, synthetic construct
  source 1..10: mol_type = other RNA
  misc_feature 1..10: note = Description of sequence: Splice site sequence
gtggtaaggc

SEQ ID NO: 2351 - RNA, 10 nt, synthetic construct
  source 1..10: mol_type = other RNA
  misc_feature 1..10: note = Description of sequence: Splice site sequence
gtggtaagta

SEQ ID NO: 2352 - RNA, 10 nt, synthetic construct
  source 1..10: mol_type = other RNA
  misc_feature 1..10: note = Description of sequence: Splice site sequence
gtggtaagtc

SEQ ID NO: 2353 - RNA, 10 nt, synthetic construct
  source 1..10: mol_type = other RNA
  misc_feature 1..10: note = Description of sequence: Splice site sequence
gtggtaagtg

SEQ ID NO: 2354 - RNA, 10 nt, synthetic construct
  source 1..10: mol_type = other RNA
  misc_feature 1..10: note = Description of sequence: Splice site sequence
gtggtaagtt

SEQ ID NO: 2355 - RNA, 10 nt, synthetic construct
  source 1..10: mol_type = other RNA
  misc_feature 1..10: note = Description of sequence: Splice site sequence
gtggtaatga

SEQ ID NO: 2356 - RNA, 10 nt, synthetic construct
  source 1..10: mol_type = other RNA
  misc_feature 1..10: note = Description of sequence: Splice site sequence
gtggtaattc

SEQ ID NO: 2357 - RNA, 10 nt, synthetic construct
  source 1..10: mol_type = other RNA
  misc_feature 1..10: note = Description of sequence: Splice site sequence
gtggtaattt

SEQ ID NO: 2358 - RNA, 10 nt, synthetic construct
  source 1..10: mol_type = other RNA
  misc_feature 1..10: note = Description of sequence: Splice site sequence
gtggtacatg

SEQ ID NO: 2359 - RNA, 10 nt, synthetic construct
  source 1..10: mol_type = other RNA
  misc_feature 1..10: note = Description of sequence: Splice site sequence
gtggtacgat

SEQ ID NO: 2360 - RNA, 10 nt, synthetic construct
  source 1..10: mol_type = other RNA
  misc_feature 1..10: note = Description of sequence: Splice site sequence
gtggtactat

SEQ ID NO: 2361 - RNA, 10 nt, synthetic construct
  source 1..10: mol_type = other RNA
  misc_feature 1..10: note = Description of sequence: Splice site sequence
gtggtacttg

SEQ ID NO: 2362 - RNA, 10 nt, synthetic construct
  source 1..10: mol_type = other RNA
  misc_feature 1..10: note = Description of sequence: Splice site sequence
gtggtagata

SEQ ID NO: 2363 - RNA, 10 nt, synthetic construct
  source 1..10: mol_type = other RNA
  misc_feature 1..10: note = Description of sequence: Splice site sequence
gtggtagcgc

SEQ ID NO: 2364 - RNA, 10 nt, synthetic construct
  source 1..10: mol_type = other RNA
  misc_feature 1..10: note = Description of sequence: Splice site sequence
gtggtaggga

SEQ ID NO: 2365 - RNA, 10 nt, synthetic construct
  source 1..10: mol_type = other RNA
  misc_feature 1..10: note = Description of sequence: Splice site sequence
gtggtaggtc

SEQ ID NO: 2366 - RNA, 10 nt, synthetic construct
  source 1..10: mol_type = other RNA
  misc_feature 1..10: note = Description of sequence: Splice site sequence
gtggtaggtg

SEQ ID NO: 2367 - RNA, 10 nt, synthetic construct
  source 1..10: mol_type = other RNA
  misc_feature 1..10: note = Description of sequence: Splice site sequence
gtggtaggtt

SEQ ID NO: 2368 - RNA, 10 nt, synthetic construct
  source 1..10: mol_type = other RNA
  misc_feature 1..10: note = Description of sequence: Splice site sequence
gtggtataaa

SEQ ID NO: 2369 - RNA, 10 nt, synthetic construct
  source 1..10: mol_type = other RNA
  misc_feature 1..10: note = Description of sequence: Splice site sequence
gtggtatctc

SEQ ID NO: 2370 - RNA, 10 nt, synthetic construct
  source 1..10: mol_type = other RNA
  misc_feature 1..10: note = Description of sequence: Splice site sequence
gtggtatgaa

SEQ ID NO: 2371 - RNA, 10 nt, synthetic construct
  source 1..10: mol_type = other RNA
  misc_feature 1..10: note = Description of sequence: Splice site sequence
gtggtatgat

SEQ ID NO: 2372 - RNA, 10 nt, synthetic construct
  source 1..10: mol_type = other RNA
  misc_feature 1..10: note = Description of sequence: Splice site sequence
gtggtatgca

SEQ ID NO: 2373 - RNA, 10 nt, synthetic construct
  source 1..10: mol_type = other RNA
  misc_feature 1..10: note = Description of sequence: Splice site sequence
gtggtatgta

SEQ ID NO: 2374 - RNA, 10 nt, synthetic construct
  source 1..10: mol_type = other RNA
  misc_feature 1..10: note = Description of sequence: Splice site sequence
gtggtatgtt

SEQ ID NO: 2375 - RNA, 10 nt, synthetic construct
  source 1..10: mol_type = other RNA
  misc_feature 1..10: note = Description of sequence: Splice site sequence
gtggtccgtg

SEQ ID NO: 2376 - RNA, 10 nt, synthetic construct
  source 1..10: mol_type = other RNA
  misc_feature 1..10: note = Description of sequence: Splice site sequence
gtggtctggc

SEQ ID NO: 2377 - RNA, 10 nt, synthetic construct
  source 1..10: mol_type = other RNA
  misc_feature 1..10: note = Description of sequence: Splice site sequence
gtggtgaaac

SEQ ID NO: 2378 - RNA, 10 nt, synthetic construct
  source 1..10: mol_type = other RNA
  misc_feature 1..10: note = Description of sequence: Splice site sequence
gtggtgagaa

SEQ ID NO: 2379 - RNA, 10 nt, synthetic construct
  source 1..10: mol_type = other RNA
  misc_feature 1..10: note = Description of sequence: Splice site sequence
gtggtgagat

SEQ ID NO: 2380 - RNA, 10 nt, synthetic construct
  source 1..10: mol_type = other RNA
  misc_feature 1..10: note = Description of sequence: Splice site sequence
gtggtgagca

SEQ ID NO: 2381 - RNA, 10 nt, synthetic construct
  source 1..10: mol_type = other RNA
  misc_feature 1..10: note = Description of sequence: Splice site sequence
gtggtgagct

SEQ ID NO: 2382 - RNA, 10 nt, synthetic construct
  source 1..10: mol_type = other RNA
  misc_feature 1..10: note = Description of sequence: Splice site sequence
gtggtgagga

SEQ ID NO: 2383 - RNA, 10 nt, synthetic construct
  source 1..10: mol_type = other RNA
  misc_feature 1..10: note = Description of sequence: Splice site sequence
gtggtgaggc

SEQ ID NO: 2384 - RNA, 10 nt, synthetic construct
  source 1..10: mol_type = other RNA
  misc_feature 1..10: note = Description of sequence: Splice site sequence
gtggtgagtg

SEQ ID NO: 2385 - RNA, 10 nt, synthetic construct
  source 1..10: mol_type = other RNA
  misc_feature 1..10: note = Description of sequence: Splice site sequence
gtggtgagtt

SEQ ID NO: 2386 - RNA, 10 nt, synthetic construct
  source 1..10: mol_type = other RNA
  misc_feature 1..10: note = Description of sequence: Splice site sequence
gtggtgatta

SEQ ID NO: 2387 - RNA, 10 nt, synthetic construct
  source 1..10: mol_type = other RNA
  misc_feature 1..10: note = Description of sequence: Splice site sequence
gtggtgattc

SEQ ID NO: 2388 - RNA, 10 nt, synthetic construct
  source 1..10: mol_type = other RNA
  misc_feature 1..10: note = Description of sequence: Splice site sequence
gtggtgcgat

SEQ ID NO: 2389 - RNA, 10 nt, synthetic construct
  source 1..10: mol_type = other RNA
  misc_feature 1..10: note = Description of sequence: Splice site sequence
gtggtgctta

SEQ ID NO: 2390 - RNA, 10 nt, synthetic construct
  source 1..10: mol_type = other RNA
  misc_feature 1..10: note = Description of sequence: Splice site sequence
gtggtgggaa

SEQ ID NO: 2391 - RNA, 10 nt, synthetic construct
  source 1..10: mol_type = other RNA
  misc_feature 1..10: note = Description of sequence: Splice site sequence
gtggtgggta

SEQ ID NO: 2392 - RNA, 10 nt, synthetic construct
  source 1..10: mol_type = other RNA
  misc_feature 1..10: note = Description of sequence: Splice site sequence
gtggtgggtc

SEQ ID NO: 2393 - RNA, 10 nt, synthetic construct
  source 1..10: mol_type = other RNA
  misc_feature 1..10: note = Description of sequence: Splice site sequence
gtggtgtccg

SEQ ID NO: 2394 - RNA, 10 nt, synthetic construct
  source 1..10: mol_type = other RNA
  misc_feature 1..10: note = Description of sequence: Splice site sequence
gtggttagca

SEQ ID NO: 2395 - RNA, 10 nt, synthetic construct
  source 1..10: mol_type = other RNA
  misc_feature 1..10: note = Description of sequence: Splice site sequence
gtggttaggt

SEQ ID NO: 2396 - RNA, 10 nt, synthetic construct
  source 1..10: mol_type = other RNA
  misc_feature 1..10: note = Description of sequence: Splice site sequence
gtggttagtg

SEQ ID NO: 2397 - RNA, 10 nt, synthetic construct
  source 1..10: mol_type = other RNA
  misc_feature 1..10: note = Description of sequence: Splice site sequence
gtggtttgca

SEQ ID NO: 2398 - RNA, 10 nt, synthetic construct
  source 1..10: mol_type = other RNA
  misc_feature 1..10: note = Description of sequence: Splice site sequence
gtggtttgta

SEQ ID NO: 2399 - RNA, 10 nt, synthetic construct
  source 1..10: mol_type = other RNA
  misc_feature 1..10: note = Description of sequence: Splice site sequence
gttgtaaggt

SEQ ID NO: 2400 - RNA, 10 nt, synthetic construct
  source 1..10: mol_type = other RNA
  misc_feature 1..10: note = Description of sequence: Splice site sequence
gttgtaagta

SEQ ID NO: 2401 - RNA, 10 nt, synthetic construct
  source 1..10: mol_type = other RNA
  misc_feature 1..10: note = Description of sequence: Splice site sequence
gttgtaagtc

SEQ ID NO: 2402 - RNA, 10 nt, synthetic construct
  source 1..10: mol_type = other RNA
  misc_feature 1..10: note = Description of sequence: Splice site sequence
gttgtaagtt

SEQ ID NO: 2403 - RNA, 10 nt, synthetic construct
  source 1..10: mol_type = other RNA
  misc_feature 1..10: note = Description of sequence: Splice site sequence
gttgtaccac

SEQ ID NO: 2404 - RNA, 10 nt, synthetic construct
  source 1..10: mol_type = other RNA
  misc_feature 1..10: note = Description of sequence: Splice site sequence
gttgtagcgt

SEQ ID NO: 2405 - RNA, 10 nt, synthetic construct
  source 1..10: mol_type = other RNA
  misc_feature 1..10: note = Description of sequence: Splice site sequence
gttgtatgtg

SEQ ID NO: 2406 - RNA, 10 nt, synthetic construct
  source 1..10: mol_type = other RNA
  misc_feature 1..10: note = Description of sequence: Splice site sequence
gttgtatgtt

SEQ ID NO: 2407 - RNA, 10 nt, synthetic construct
  source 1..10: mol_type = other RNA
  misc_feature 1..10: note = Description of sequence: Splice site sequence
gttgtctgtg

SEQ ID NO: 2408 - RNA, 10 nt, synthetic construct
  source 1..10: mol_type = other RNA
  misc_feature 1..10: note = Description of sequence: Splice site sequence
gttgtgagct

SEQ ID NO: 2409 - RNA, 10 nt, synthetic construct
  source 1..10: mol_type = other RNA
  misc_feature 1..10: note = Description of sequence: Splice site sequence
gttgtgagtg

SEQ ID NO: 2410 - RNA, 10 nt, synthetic construct
  source 1..10: mol_type = other RNA
  misc_feature 1..10: note = Description of sequence: Splice site sequence
gttgtgagtt

SEQ ID NO: 2411 - RNA, 10 nt, synthetic construct
  source 1..10: mol_type = other RNA
  misc_feature 1..10: note = Description of sequence: Splice site sequence
gttgtgggta

SEQ ID NO: 2412 - RNA, 10 nt, synthetic construct
  source 1..10: mol_type = other RNA
  misc_feature 1..10: note = Description of sequence: Splice site sequence
gttgtgggtt

SEQ ID NO: 2413 - RNA, 10 nt, synthetic construct
  source 1..10: mol_type = other RNA
  misc_feature 1..10: note = Description of sequence: Splice site sequence
taagtaaatg

SEQ ID NO: 2414 - RNA, 10 nt, synthetic construct
  source 1..10: mol_type = other RNA
  misc_feature 1..10: note = Description of sequence: Splice site sequence
taagtaacta

SEQ ID NO: 2415 - RNA, 10 nt, synthetic construct
  source 1..10: mol_type = other RNA
  misc_feature 1..10: note = Description of sequence: Splice site sequence
taagtaagaa

SEQ ID NO: 2416 - RNA, 10 nt, synthetic construct
  source 1..10: mol_type = other RNA
  misc_feature 1..10: note = Description of sequence: Splice site sequence
taagtaagag

SEQ ID NO: 2417 - RNA, 10 nt, synthetic construct
  source 1..10: mol_type = other RNA
  misc_feature 1..10: note = Description of sequence: Splice site sequence
taagtaagat

SEQ ID NO: 2418 - RNA, 10 nt, synthetic construct
  source 1..10: mol_type = other RNA
  misc_feature 1..10: note = Description of sequence: Splice site sequence
taagtaagca

SEQ ID NO: 2419 - RNA, 10 nt, synthetic construct
  source 1..10: mol_type = other RNA
  misc_feature 1..10: note = Description of sequence: Splice site sequence
taagtaagct

SEQ ID NO: 2420 - RNA, 10 nt, synthetic construct
  source 1..10: mol_type = other RNA
  misc_feature 1..10: note = Description of sequence: Splice site sequence
taagtaagga

SEQ ID NO: 2421 - RNA, 10 nt, synthetic construct
  source 1..10: mol_type = other RNA
  misc_feature 1..10: note = Description of sequence: Splice site sequence
taagtaaggt

SEQ ID NO: 2422 - RNA, 10 nt, synthetic construct
  source 1..10: mol_type = other RNA
  misc_feature 1..10: note = Description of sequence: Splice site sequence
taagtaagta

SEQ ID NO: 2423 - RNA, 10 nt, synthetic construct
  source 1..10: mol_type = other RNA
  misc_feature 1..10: note = Description of sequence: Splice site sequence
taagtaagtc

SEQ ID NO: 2424 - RNA, 10 nt, synthetic construct
  source 1..10: mol_type = other RNA
  misc_feature 1..10: note = Description of sequence: Splice site sequence
taagtaagtg

SEQ ID NO: 2425 - RNA, 10 nt, synthetic construct
  source 1..10: mol_type = other RNA
  misc_feature 1..10: note = Description of sequence: Splice site sequence
taagtaagtt

SEQ ID NO: 2426 - RNA, 10 nt, synthetic construct
  source 1..10: mol_type = other RNA
  misc_feature 1..10: note = Description of sequence: Splice site sequence
taagtaataa

SEQ ID NO: 2427 - RNA, 10 nt, synthetic construct
  source 1..10: mol_type = other RNA
  misc_feature 1..10: note = Description of sequence: Splice site sequence
taagtactag

SEQ ID NO: 2428 - RNA, 10 nt, synthetic construct
  source 1..10: mol_type = other RNA
  misc_feature 1..10: note = Description of sequence: Splice site sequence
taagtagttt

SEQ ID NO: 2429 - RNA, 10 nt, synthetic construct
  source 1..10: mol_type = other RNA
  misc_feature 1..10: note = Description of sequence: Splice site sequence
taagtataaa

SEQ ID NO: 2430 - RNA, 10 nt, synthetic construct
  source 1..10: mol_type = other RNA
  misc_feature 1..10: note = Description of sequence: Splice site sequence
taagtataca

SEQ ID NO: 2431 - RNA, 10 nt, synthetic construct
  source 1..10: mol_type = other RNA
  misc_feature 1..10: note = Description of sequence: Splice site sequence
taagtatgta

SEQ ID NO: 2432 - RNA, 10 nt, synthetic construct
  source 1..10: mol_type = other RNA
  misc_feature 1..10: note = Description of sequence: Splice site sequence
taagtattat

SEQ ID NO: 2433 - RNA, 10 nt, synthetic construct
  source 1..10: mol_type = other RNA
  misc_feature 1..10: note = Description of sequence: Splice site sequence
taagtatttt

SEQ ID NO: 2434 - RNA, 10 nt, synthetic construct
  source 1..10: mol_type = other RNA
  misc_feature 1..10: note = Description of sequence: Splice site sequence
taagtctttt

SEQ ID NO: 2435 - RNA, 10 nt, synthetic construct
  source 1..10: mol_type = other RNA
  misc_feature 1..10: note = Description of sequence: Splice site sequence
taagtgagac

SEQ ID NO: 2436 - RNA, 10 nt, synthetic construct
  source 1..10: mol_type = other RNA
  misc_feature 1..10: note = Description of sequence: Splice site sequence
taagtgagga

SEQ ID NO: 2437 - RNA, 10 nt, synthetic construct
  source 1..10: mol_type = other RNA
  misc_feature 1..10: note = Description of sequence: Splice site sequence
taagtgaggg

SEQ ID NO: 2438 - RNA, 10 nt, synthetic construct
  source 1..10: mol_type = other RNA
  misc_feature 1..10: note = Description of sequence: Splice site sequence
taagtgagta

SEQ ID NO: 2439 - RNA, 10 nt, synthetic construct
  source 1..10: mol_type = other RNA
  misc_feature 1..10: note = Description of sequence: Splice site sequence
taagtgagtc

SEQ ID NO: 2440 - RNA, 10 nt, synthetic construct
  source 1..10: mol_type = other RNA
  misc_feature 1..10: note = Description of sequence: Splice site sequence
taagtgagtg

SEQ ID NO: 2441 - RNA, 10 nt, synthetic construct
  source 1..10: mol_type = other RNA
  misc_feature 1..10: note = Description of sequence: Splice site sequence
taagtgagtt

SEQ ID NO: 2442 - RNA, 10 nt, synthetic construct
  source 1..10: mol_type = other RNA
  misc_feature 1..10: note = Description of sequence: Splice site sequence
taagtgatcc

SEQ ID NO: 2443 - RNA, 10 nt, synthetic construct
  source 1..10: mol_type = other RNA
  misc_feature 1..10: note = Description of sequence: Splice site sequence
taagtgattc

SEQ ID NO: 2444 - RNA, 10 nt, synthetic construct
  source 1..10: mol_type = other RNA
  misc_feature 1..10: note = Description of sequence: Splice site sequence
taagtgcgtg

SEQ ID NO: 2445 - RNA, 10 nt, synthetic construct
  source 1..10: mol_type = other RNA
  misc_feature 1..10: note = Description of sequence: Splice site sequence
taagttaagt

SEQ ID NO: 2446 - RNA, 10 nt, synthetic construct
  source 1..10: mol_type = other RNA
  misc_feature 1..10: note = Description of sequence: Splice site sequence
taagttccag

SEQ ID NO: 2447 - RNA, 10 nt, synthetic construct
  source 1..10: mol_type = other RNA
  misc_feature 1..10: note = Description of sequence: Splice site sequence
taagttcttt

SEQ ID NO: 2448 - RNA, 10 nt, synthetic construct
  source 1..10: mol_type = other RNA
  misc_feature 1..10: note = Description of sequence: Splice site sequence
taagttgtaa

SEQ ID NO: 2449 - RNA, 10 nt, synthetic construct
  source 1..10: mol_type = other RNA
  misc_feature 1..10: note = Description of sequence: Splice site sequence
taagttgtat

SEQ ID NO: 2450 - RNA, 10 nt, synthetic construct
  source 1..10: mol_type = other RNA
  misc_feature 1..10: note = Description of sequence: Splice site sequence
taagtttgtt

SEQ ID NO: 2451 - RNA, 10 nt, synthetic construct
  source 1..10: mol_type = other RNA
  misc_feature 1..10: note = Description of sequence: Splice site sequence
tacgtaactg

SEQ ID NO: 2452 - RNA, 10 nt, synthetic construct
  source 1..10: mol_type = other RNA
  misc_feature 1..10: note = Description of sequence: Splice site sequence
tacgtaagaa

SEQ ID NO: 2453 - RNA, 10 nt, synthetic construct
  source 1..10: mol_type = other RNA
  misc_feature 1..10: note = Description of sequence: Splice site sequence
tacgtaagat

SEQ ID NO: 2454 - RNA, 10 nt, synthetic construct
  source 1..10: mol_type = other RNA
  misc_feature 1..10: note = Description of sequence: Splice site sequence
tacgtaagta

SEQ ID NO: 2455 - RNA, 10 nt, synthetic construct
  source 1..10: mol_type = other RNA
  misc_feature 1..10: note = Description of sequence: Splice site sequence
tacgtaagtg

SEQ ID NO: 2456 - RNA, 10 nt, synthetic construct
  source 1..10: mol_type = other RNA
  misc_feature 1..10: note = Description of sequence: Splice site sequence
tacgtatcct

SEQ ID NO: 2457 - RNA, 10 nt, synthetic construct
  source 1..10: mol_type = other RNA
  misc_feature 1..10: note = Description of sequence: Splice site sequence
tacgtctggc

SEQ ID NO: 2458 - RNA, 10 nt, synthetic construct
  source 1..10: mol_type = other RNA
  misc_feature 1..10: note = Description of sequence: Splice site sequence
tacgtgacca

SEQ ID NO: 2459 - RNA, 10 nt, synthetic construct
  source 1..10: mol_type = other RNA
  misc_feature 1..10: note = Description of sequence: Splice site sequence
taggcaagac

SEQ ID NO: 2460 - RNA, 10 nt, synthetic construct
  source 1..10: mol_type = other RNA
  misc_feature 1..10: note = Description of sequence: Splice site sequence
taggcaagtc

SEQ ID NO: 2461 - RNA, 10 nt, synthetic construct
  source 1..10: mol_type = other RNA
  misc_feature 1..10: note = Description of sequence: Splice site sequence
taggcaggtc

SEQ ID NO: 2462 - RNA, 10 nt, synthetic construct
  source 1..10: mol_type = other RNA
  misc_feature 1..10: note = Description of sequence: Splice site sequence
taggcgtgtg

SEQ ID NO: 2463 - RNA, 10 nt, synthetic construct
  source 1..10: mol_type = other RNA
  misc_feature 1..10: note = Description of sequence: Splice site sequence
taggtaaaaa

SEQ ID NO: 2464 - RNA, 10 nt, synthetic construct
  source 1..10: mol_type = other RNA
  misc_feature 1..10: note = Description of sequence: Splice site sequence
taggtaaaac

SEQ ID NO: 2465 - RNA, 10 nt, synthetic construct
  source 1..10: mol_type = other RNA
  misc_feature 1..10: note = Description of sequence: Splice site sequence
taggtaaaag

SEQ ID NO: 2466 - RNA, 10 nt, synthetic construct
  source 1..10: mol_type = other RNA
  misc_feature 1..10: note = Description of sequence: Splice site sequence
taggtaaaat

SEQ ID NO: 2467 - RNA, 10 nt, synthetic construct
  source 1..10: mol_type = other RNA
  misc_feature 1..10: note = Description of sequence: Splice site sequence
taggtaaaca

SEQ ID NO: 2468 - RNA, 10 nt, synthetic construct
  source 1..10: mol_type = other RNA
  misc_feature 1..10: note = Description of sequence: Splice site sequence
taggtaaaga

SEQ ID NO: 2469 - RNA, 10 nt, synthetic construct
  source 1..10: mol_type = other RNA
  misc_feature 1..10: note = Description of sequence: Splice site sequence
taggtaaata

SEQ ID NO: 2470 - RNA, 10 nt, synthetic construct
  source 1..10: mol_type = other RNA
  misc_feature 1..10: note = Description of sequence: Splice site sequence
taggtaaatc

SEQ ID NO: 2471 - RNA, 10 nt, synthetic construct
  source 1..10: mol_type = other RNA
  misc_feature 1..10: note = Description of sequence: Splice site sequence
taggtaaatg

SEQ ID NO: 2472 - RNA, 10 nt, synthetic construct
  source 1..10: mol_type = other RNA
  misc_feature 1..10: note = Description of sequence: Splice site sequence
taggtaaatt

SEQ ID NO: 2473 - RNA, 10 nt, synthetic construct
  source 1..10: mol_type = other RNA
  misc_feature 1..10: note = Description of sequence: Splice site sequence
taggtaacac

SEQ ID NO: 2474 - RNA, 10 nt, synthetic construct
  source 1..10: mol_type = other RNA
  misc_feature 1..10: note = Description of sequence: Splice site sequence
taggtaacag

SEQ ID NO: 2475 - RNA, 10 nt, synthetic construct
  source 1..10: mol_type = other RNA
  misc_feature 1..10: note = Description of sequence: Splice site sequence
taggtaacat

SEQ ID NO: 2476 - RNA, 10 nt, synthetic construct
  source 1..10: mol_type = other RNA
  misc_feature 1..10: note = Description of sequence: Splice site sequence
taggtaacca

SEQ ID NO: 2477 - RNA, 10 nt, synthetic construct
  source 1..10: mol_type = other RNA
  misc_feature 1..10: note = Description of sequence: Splice site sequence
taggtaacgg

SEQ ID NO: 2478 - RNA, 10 nt, synthetic construct
  source 1..10: mol_type = other RNA
  misc_feature 1..10: note = Description of sequence: Splice site sequence
taggtaacta

SEQ ID NO: 2479 - RNA, 10 nt, synthetic construct
  source 1..10: mol_type = other RNA
  misc_feature 1..10: note = Description of sequence: Splice site sequence
taggtaactc

SEQ ID NO: 2480 - RNA, 10 nt, synthetic construct
  source 1..10: mol_type = other RNA
  misc_feature 1..10: note = Description of sequence: Splice site sequence
taggtaactg

SEQ ID NO: 2481 - RNA, 10 nt, synthetic construct
  source 1..10: mol_type = other RNA
  misc_feature 1..10: note = Description of sequence: Splice site sequence
taggtaactt

SEQ ID NO: 2482 - RNA, 10 nt, synthetic construct
  source 1..10: mol_type = other RNA
  misc_feature 1..10: note = Description of sequence: Splice site sequence
taggtaagac

SEQ ID NO: 2483 - RNA, 10 nt, synthetic construct
  source 1..10: mol_type = other RNA
  misc_feature 1..10: note = Description of sequence: Splice site sequence
taggtaagag

SEQ ID NO: 2484 - RNA, 10 nt, synthetic construct
  source 1..10: mol_type = other RNA
  misc_feature 1..10: note = Description of sequence: Splice site sequence
taggtaagat

SEQ ID NO: 2485 - RNA, 10 nt, synthetic construct
  source 1..10: mol_type = other RNA
  misc_feature 1..10: note = Description of sequence: Splice site sequence
taggtaagca

SEQ ID NO: 2486 - RNA, 10 nt, synthetic construct
  source 1..10: mol_type = other RNA
  misc_feature 1..10: note = Description of sequence: Splice site sequence
taggtaagcc

SEQ ID NO: 2487 - RNA, 10 nt, synthetic construct
  source 1..10: mol_type = other RNA
  misc_feature 1..10: note = Description of sequence: Splice site sequence
taggtaagct

SEQ ID NO: 2488 - RNA, 10 nt, synthetic construct
  source 1..10: mol_type = other RNA
  misc_feature 1..10: note = Description of sequence: Splice site sequence
taggtaagga

SEQ ID NO: 2489 - RNA, 10 nt, synthetic construct
  source 1..10: mol_type = other RNA
  misc_feature 1..10: note = Description of sequence: Splice site sequence
taggtaaggc

SEQ ID NO: 2490 - RNA, 10 nt, synthetic construct
  source 1..10: mol_type = other RNA
  misc_feature 1..10: note = Description of sequence: Splice site sequence
taggtaaggg

SEQ ID NO: 2491 - RNA, 10 nt, synthetic construct
  source 1..10: mol_type = other RNA
  misc_feature 1..10: note = Description of sequence: Splice site sequence
taggtaagta

SEQ ID NO: 2492 - RNA, 10 nt, synthetic construct
  source 1..10: mol_type = other RNA
  misc_feature 1..10: note = Description of sequence: Splice site sequence
taggtaagtc

SEQ ID NO: 2493 - RNA, 10 nt, synthetic construct
  source 1..10: mol_type = other RNA
  misc_feature 1..10: note = Description of sequence: Splice site sequence
taggtaagtg

SEQ ID NO: 2494 - RNA, 10 nt, synthetic construct
  source 1..10: mol_type = other RNA
  misc_feature 1..10: note = Description of sequence: Splice site sequence
taggtaagtt

SEQ ID NO: 2495 - RNA, 10 nt, synthetic construct
  source 1..10: mol_type = other RNA
  misc_feature 1..10: note = Description of sequence: Splice site sequence
taggtaatag

SEQ ID NO: 2496 - RNA, 10 nt, synthetic construct
  source 1..10: mol_type = other RNA
  misc_feature 1..10: note = Description of sequence: Splice site sequence
taggtaatat

SEQ ID NO: 2497 - RNA, 10 nt, synthetic construct
  source 1..10: mol_type = other RNA
  misc_feature 1..10: note = Description of sequence: Splice site sequence
taggtaatct

SEQ ID NO: 2498 - RNA, 10 nt, synthetic construct
  source 1..10: mol_type = other RNA
  misc_feature 1..10: note = Description of sequence: Splice site sequence
taggtaatga

SEQ ID NO: 2499 - RNA, 10 nt, synthetic construct
  source 1..10: mol_type = other RNA
  misc_feature 1..10: note = Description of sequence: Splice site sequence
taggtaatgg

SEQ ID NO: 2500 - RNA, 10 nt, synthetic construct
  source 1..10: mol_type = other RNA
  misc_feature 1..10: note = Description of sequence: Splice site sequence
taggtaatgt

SEQ ID NO: 2501 - RNA, 10 nt, synthetic construct
  source 1..10: mol_type = other RNA
  misc_feature 1..10: note = Description of sequence: Splice site sequence
taggtaatta

SEQ ID NO: 2502 - RNA, 10 nt, synthetic construct
  source 1..10: mol_type = other RNA
  misc_feature 1..10: note = Description of sequence: Splice site sequence
taggtaattc

SEQ ID NO: 2503 - RNA, 10 nt, synthetic construct
  source 1..10: mol_type = other RNA
  misc_feature 1..10: note = Description of sequence: Splice site sequence
taggtaattt

SEQ ID NO: 2504 - RNA, 10 nt, synthetic construct
  source 1..10: mol_type = other RNA
  misc_feature 1..10: note = Description of sequence: Splice site sequence
taggtacagc

SEQ ID NO: 2505 - RNA, 10 nt, synthetic construct
  source 1..10: mol_type = other RNA
  misc_feature 1..10: note = Description of sequence: Splice site sequence
taggtacagt

SEQ ID NO: 2506 - RNA, 10 nt, synthetic construct
  source 1..10: mol_type = other RNA
  misc_feature 1..10: note = Description of sequence: Splice site sequence
taggtacatt

SEQ ID NO: 2507 - RNA, 10 nt, synthetic construct
  source 1..10: mol_type = other RNA
  misc_feature 1..10: note = Description of sequence: Splice site sequence
taggtaccag

SEQ ID NO: 2508 - RNA, 10 nt, synthetic construct
  source 1..10: mol_type = other RNA
  misc_feature 1..10: note = Description of sequence: Splice site sequence
taggtaccta

SEQ ID NO: 2509 - RNA, 10 nt, synthetic construct
  source 1..10: mol_type = other RNA
  misc_feature 1..10: note = Description of sequence: Splice site sequence
taggtacctt

SEQ ID NO: 2510 - RNA, 10 nt, synthetic construct
  source 1..10: mol_type = other RNA
  misc_feature 1..10: note = Description of sequence: Splice site sequence
taggtacgag

SEQ ID NO: 2511 - RNA, 10 nt, synthetic construct
  source 1..10: mol_type = other RNA
  misc_feature 1..10: note = Description of sequence: Splice site sequence
taggtacgta

SEQ ID NO: 2512 - RNA, 10 nt, synthetic construct
  source 1..10: mol_type = other RNA
  misc_feature 1..10: note = Description of sequence: Splice site sequence
taggtacgtt

SEQ ID NO: 2513 - RNA, 10 nt, synthetic construct
  source 1..10: mol_type = other RNA
  misc_feature 1..10: note = Description of sequence: Splice site sequence
taggtactat

SEQ ID NO: 2514 - RNA, 10 nt, synthetic construct
  source 1..10: mol_type = other RNA
  misc_feature 1..10: note = Description of sequence: Splice site sequence
taggtactga

SEQ ID NO: 2515 - RNA, 10 nt, synthetic construct
  source 1..10: mol_type = other RNA
  misc_feature 1..10: note = Description of sequence: Splice site sequence
taggtactgg

SEQ ID NO: 2516 - RNA, 10 nt, synthetic construct
  source 1..10: mol_type = other RNA
  misc_feature 1..10: note = Description of sequence: Splice site sequence
taggtacttc

SEQ ID NO: 2517 - RNA, 10 nt, synthetic construct
  source 1..10: mol_type = other RNA
  misc_feature 1..10: note = Description of sequence: Splice site sequence
taggtacttt

SEQ ID NO: 2518 - RNA, 10 nt, synthetic construct
  source 1..10: mol_type = other RNA
  misc_feature 1..10: note = Description of sequence: Splice site sequence
taggtagcgg

SEQ ID NO: 2519 - RNA, 10 nt, synthetic construct
  source 1..10: mol_type = other RNA
  misc_feature 1..10: note = Description of sequence: Splice site sequence
taggtaggaa

SEQ ID NO: 2520 - RNA, 10 nt, synthetic construct
  source 1..10: mol_type = other RNA
  misc_feature 1..10: note = Description of sequence: Splice site sequence
taggtaggac

SEQ ID NO: 2521 - RNA, 10 nt, synthetic construct
  source 1..10: mol_type = other RNA
  misc_feature 1..10: note = Description of sequence: Splice site sequence
taggtaggat

SEQ ID NO: 2522 - RNA, 10 nt, synthetic construct
  source 1..10: mol_type = other RNA
  misc_feature 1..10: note = Description of sequence: Splice site sequence
taggtaggga

SEQ ID NO: 2523 - RNA, 10 nt, synthetic construct
  source 1..10: mol_type = other RNA
  misc_feature 1..10: note = Description of sequence: Splice site sequence
taggtagggg

SEQ ID NO: 2524 - RNA, 10 nt, synthetic construct
  source 1..10: mol_type = other RNA
  misc_feature 1..10: note = Description of sequence: Splice site sequence
taggtaggta

SEQ ID NO: 2525 - RNA, 10 nt, synthetic construct
  source 1..10: mol_type = other RNA
  misc_feature 1..10: note = Description of sequence: Splice site sequence
taggtaggtc

SEQ ID NO: 2526 - RNA, 10 nt, synthetic construct
  source 1..10: mol_type = other RNA
  misc_feature 1..10: note = Description of sequence: Splice site sequence
taggtaggtg

SEQ ID NO: 2527 - RNA, 10 nt, synthetic construct
  source 1..10: mol_type = other RNA
  misc_feature 1..10: note = Description of sequence: Splice site sequence
taggtaggtt

SEQ ID NO: 2528 - RNA, 10 nt, synthetic construct
  source 1..10: mol_type = other RNA
  misc_feature 1..10: note = Description of sequence: Splice site sequence
taggtagtaa

SEQ ID NO: 2529 - RNA, 10 nt, synthetic construct
  source 1..10: mol_type = other RNA
  misc_feature 1..10: note = Description of sequence: Splice site sequence
taggtagtct

SEQ ID NO: 2530 - RNA, 10 nt, synthetic construct
  source 1..10: mol_type = other RNA
  misc_feature 1..10: note = Description of sequence: Splice site sequence
taggtagtgg

SEQ ID NO: 2531 - RNA, 10 nt, synthetic construct
  source 1..10: mol_type = other RNA
  misc_feature 1..10: note = Description of sequence: Splice site sequence
taggtagtgt

SEQ ID NO: 2532 - RNA, 10 nt, synthetic construct
  source 1..10: mol_type = other RNA
  misc_feature 1..10: note = Description of sequence: Splice site sequence
taggtagttt

SEQ ID NO: 2533 - RNA, 10 nt, synthetic construct
  source 1..10: mol_type = other RNA
  misc_feature 1..10: note = Description of sequence: Splice site sequence
taggtataaa

SEQ ID NO: 2534 - RNA, 10 nt, synthetic construct
  source 1..10: mol_type = other RNA
  misc_feature 1..10: note = Description of sequence: Splice site sequence
taggtataac

SEQ ID NO: 2535 - RNA, 10 nt, synthetic construct
  source 1..10: mol_type = other RNA
  misc_feature 1..10: note = Description of sequence: Splice site sequence
taggtataag

SEQ ID NO: 2536 - RNA, 10 nt, synthetic construct
  source 1..10: mol_type = other RNA
  misc_feature 1..10: note = Description of sequence: Splice site sequence
taggtataat

SEQ ID NO: 2537 - RNA, 10 nt, synthetic construct
  source 1..10: mol_type = other RNA
  misc_feature 1..10: note = Description of sequence: Splice site sequence
taggtataca

SEQ ID NO: 2538 - RNA, 10 nt, synthetic construct
  source 1..10: mol_type = other RNA
  misc_feature 1..10: note = Description of sequence: Splice site sequence
taggtatact

SEQ ID NO: 2539 - RNA, 10 nt, synthetic construct
  source 1..10: mol_type = other RNA
  misc_feature 1..10: note = Description of sequence: Splice site sequence
taggtatata

SEQ ID NO: 2540 - RNA, 10 nt, synthetic construct
  source 1..10: mol_type = other RNA
  misc_feature 1..10: note = Description of sequence: Splice site sequence
taggtatatc

SEQ ID NO: 2541 - RNA, 10 nt, synthetic construct
  source 1..10: mol_type = other RNA
  misc_feature 1..10: note = Description of sequence: Splice site sequence
taggtatatt

SEQ ID NO: 2542 - RNA, 10 nt, synthetic construct
  source 1..10: mol_type = other RNA
  misc_feature 1..10: note = Description of sequence: Splice site sequence
taggtatcag

SEQ ID NO: 2543 - RNA, 10 nt, synthetic construct
  source 1..10: mol_type = other RNA
  misc_feature 1..10: note = Description of sequence: Splice site sequence
taggtatcta

SEQ ID NO: 2544 - RNA, 10 nt, synthetic construct
  source 1..10: mol_type = other RNA
  misc_feature 1..10: note = Description of sequence: Splice site sequence
taggtatctc

SEQ ID NO: 2545 - RNA, 10 nt, synthetic construct
  source 1..10: mol_type = other RNA
  misc_feature 1..10: note = Description of sequence: Splice site sequence
taggtatgaa

SEQ ID NO: 2546 - RNA, 10 nt, synthetic construct
  source 1..10: mol_type = other RNA
  misc_feature 1..10: note = Description of sequence: Splice site sequence
taggtatgag

SEQ ID NO: 2547 - RNA, 10 nt, synthetic construct
  source 1..10: mol_type = other RNA
  misc_feature 1..10: note = Description of sequence: Splice site sequence
taggtatgca

SEQ ID NO: 2548 - RNA, 10 nt, synthetic construct
  source 1..10: mol_type = other RNA
  misc_feature 1..10: note = Description of sequence: Splice site sequence
taggtatgga

SEQ ID NO: 2549 - RNA, 10 nt, synthetic construct
  source 1..10: mol_type = other RNA
  misc_feature 1..10: note = Description of sequence: Splice site sequence
taggtatggc

SEQ ID NO: 2550 - RNA, 10 nt, synthetic construct
  source 1..10: mol_type = other RNA
  misc_feature 1..10: note = Description of sequence: Splice site sequence
taggtatggt

SEQ ID NO: 2551 - RNA, 10 nt, synthetic construct
  source 1..10: mol_type = other RNA
  misc_feature 1..10: note = Description of sequence: Splice site sequence
taggtatgta

SEQ ID NO: 2552 - RNA, 10 nt, synthetic construct
  source 1..10: mol_type = other RNA
  misc_feature 1..10: note = Description of sequence: Splice site sequence
taggtatgtc

SEQ ID NO: 2553 - RNA, 10 nt, synthetic construct
  source 1..10: mol_type = other RNA
  misc_feature 1..10: note = Description of sequence: Splice site sequence
taggtatgtg

SEQ ID NO: 2554 - RNA, 10 nt, synthetic construct
  source 1..10: mol_type = other RNA
  misc_feature 1..10: note = Description of sequence: Splice site sequence
taggtatgtt

SEQ ID NO: 2555 - RNA, 10 nt, synthetic construct
  source 1..10: mol_type = other RNA
  misc_feature 1..10: note = Description of sequence: Splice site sequence
taggtattaa

SEQ ID NO: 2556 - RNA, 10 nt, synthetic construct
  source 1..10: mol_type = other RNA
  misc_feature 1..10: note = Description of sequence: Splice site sequence
taggtattac

SEQ ID NO: 2557 - RNA, 10 nt, synthetic construct
  source 1..10: mol_type = other RNA
  misc_feature 1..10: note = Description of sequence: Splice site sequence
taggtattat

SEQ ID NO: 2558 - RNA, 10 nt, synthetic construct
  source 1..10: mol_type = other RNA
  misc_feature 1..10: note = Description of sequence: Splice site sequence
taggtattca

SEQ ID NO: 2559 - RNA, 10 nt, synthetic construct
  source 1..10: mol_type = other RNA
  misc_feature 1..10: note = Description of sequence: Splice site sequence
taggtattcc

SEQ ID NO: 2560 - RNA, 10 nt, synthetic construct
  source 1..10: mol_type = other RNA
  misc_feature 1..10: note = Description of sequence: Splice site sequence
taggtattct

SEQ ID NO: 2561 - RNA, 10 nt, synthetic construct
  source 1..10: mol_type = other RNA
  misc_feature 1..10: note = Description of sequence: Splice site sequence
taggtattga

SEQ ID NO: 2562 - RNA, 10 nt, synthetic construct
  source 1..10: mol_type = other RNA
  misc_feature 1..10: note = Description of sequence: Splice site sequence
taggtattta

SEQ ID NO: 2563 - RNA, 10 nt, synthetic construct
  source 1..10: mol_type = other RNA
  misc_feature 1..10: note = Description of sequence: Splice site sequence
taggtatttc

SEQ ID NO: 2564 - RNA, 10 nt, synthetic construct
  source 1..10: mol_type = other RNA
  misc_feature 1..10: note = Description of sequence: Splice site sequence
taggtatttt

SEQ ID NO: 2565 - RNA, 10 nt, synthetic construct
  source 1..10: mol_type = other RNA
  misc_feature 1..10: note = Description of sequence: Splice site sequence
taggtcactc

SEQ ID NO: 2566 - RNA, 10 nt, synthetic construct
  source 1..10: mol_type = other RNA
  misc_feature 1..10: note = Description of sequence: Splice site sequence
taggtcagct

SEQ ID NO: 2567 - RNA, 10 nt, synthetic construct
  source 1..10: mol_type = other RNA
  misc_feature 1..10: note = Description of sequence: Splice site sequence
taggtcaggt

SEQ ID NO: 2568 - RNA, 10 nt, synthetic construct
  source 1..10: mol_type = other RNA
  misc_feature 1..10: note = Description of sequence: Splice site sequence
taggtcagta

SEQ ID NO: 2569 - RNA, 10 nt, synthetic construct
  source 1..10: mol_type = other RNA
  misc_feature 1..10: note = Description of sequence: Splice site sequence
taggtcagtg

SEQ ID NO: 2570 - RNA, 10 nt, synthetic construct
  source 1..10: mol_type = other RNA
  misc_feature 1..10: note = Description of sequence: Splice site sequence
taggtcagtt

SEQ ID NO: 2571 - RNA, 10 nt, synthetic construct
  source 1..10: mol_type = other RNA
  misc_feature 1..10: note = Description of sequence: Splice site sequence
taggtcatct

SEQ ID NO: 2572 - RNA, 10 nt, synthetic construct
  source 1..10: mol_type = other RNA
  misc_feature 1..10: note = Description of sequence: Splice site sequence
taggtcattg

SEQ ID NO: 2573 - RNA, 10 nt, synthetic construct
  source 1..10: mol_type = other RNA
  misc_feature 1..10: note = Description of sequence: Splice site sequence
taggtccaat

SEQ ID NO: 2574 - RNA, 10 nt, synthetic construct
  source 1..10: mol_type = other RNA
  misc_feature 1..10: note = Description of sequence: Splice site sequence
taggtcctgt

SEQ ID NO: 2575 - RNA, 10 nt, synthetic construct
  source 1..10: mol_type = other RNA
  misc_feature 1..10: note = Description of sequence: Splice site sequence
taggtctcaa

SEQ ID NO: 2576 - RNA, 10 nt, synthetic construct
  source 1..10: mol_type = other RNA
  misc_feature 1..10: note = Description of sequence: Splice site sequence
taggtctcgc

SEQ ID NO: 2577 - RNA, 10 nt, synthetic construct
  source 1..10: mol_type = other RNA
  misc_feature 1..10: note = Description of sequence: Splice site sequence
taggtctggc

SEQ ID NO: 2578 - RNA, 10 nt, synthetic construct
  source 1..10: mol_type = other RNA
  misc_feature 1..10: note = Description of sequence: Splice site sequence
taggtctgtc

SEQ ID NO: 2579 - RNA, 10 nt, synthetic construct
  source 1..10: mol_type = other RNA
  misc_feature 1..10: note = Description of sequence: Splice site sequence
taggtctgtg

SEQ ID NO: 2580 - RNA, 10 nt, synthetic construct
  source 1..10: mol_type = other RNA
  misc_feature 1..10: note = Description of sequence: Splice site sequence
taggtgaagt

SEQ ID NO: 2581 - RNA, 10 nt, synthetic construct
  source 1..10: mol_type = other RNA
  misc_feature 1..10: note = Description of sequence: Splice site sequence
taggtgaata

SEQ ID NO: 2582 - RNA, 10 nt, synthetic construct
  source 1..10: mol_type = other RNA
  misc_feature 1..10: note = Description of sequence: Splice site sequence
taggtgaatg

SEQ ID NO: 2583 - RNA, 10 nt, synthetic construct
  source 1..10: mol_type = other RNA
  misc_feature 1..10: note = Description of sequence: Splice site sequence
taggtgaatt

SEQ ID NO: 2584 - RNA, 10 nt, synthetic construct
  source 1..10: mol_type = other RNA
  misc_feature 1..10: note = Description of sequence: Splice site sequence
taggtgacat

SEQ ID NO: 2585 - RNA, 10 nt, synthetic construct
  source 1..10: mol_type = other RNA
  misc_feature 1..10: note = Description of sequence: Splice site sequence
taggtgacca

SEQ ID NO: 2586 - RNA, 10 nt, synthetic construct
  source 1..10: mol_type = other RNA
  misc_feature 1..10: note = Description of sequence: Splice site sequence
taggtgacta

SEQ ID NO: 2587 - RNA, 10 nt, synthetic construct
  source 1..10: mol_type = other RNA
  misc_feature 1..10: note = Description of sequence: Splice site sequence
taggtgagaa

SEQ ID NO: 2588 - RNA, 10 nt, synthetic construct
  source 1..10: mol_type = other RNA
  misc_feature 1..10: note = Description of sequence: Splice site sequence
taggtgagac

SEQ ID NO: 2589 - RNA, 10 nt, synthetic construct
  source 1..10: mol_type = other RNA
  misc_feature 1..10: note = Description of sequence: Splice site sequence
taggtgagag

SEQ ID NO: 2590 - RNA, 10 nt, synthetic construct
  source 1..10: mol_type = other RNA
  misc_feature 1..10: note = Description of sequence: Splice site sequence
taggtgagat

SEQ ID NO: 2591 - RNA, 10 nt, synthetic construct
  source 1..10: mol_type = other RNA
  misc_feature 1..10: note = Description of sequence: Splice site sequence
taggtgagcc

SEQ ID NO: 2592 - RNA, 10 nt, synthetic construct
  source 1..10: mol_type = other RNA
  misc_feature 1..10: note = Description of sequence: Splice site sequence
taggtgagct

SEQ ID NO: 2593 - RNA, 10 nt, synthetic construct
  source 1..10: mol_type = other RNA
  misc_feature 1..10: note = Description of sequence: Splice site sequence
taggtgagga

SEQ ID NO: 2594 - RNA, 10 nt, synthetic construct
  source 1..10: mol_type = other RNA
  misc_feature 1..10: note = Description of sequence: Splice site sequence
taggtgaggc

SEQ ID NO: 2595 - RNA, 10 nt, synthetic construct
  source 1..10: mol_type = other RNA
  misc_feature 1..10: note = Description of sequence: Splice site sequence
taggtgaggt

SEQ ID NO: 2596 - RNA, 10 nt, synthetic construct
  source 1..10: mol_type = other RNA
  misc_feature 1..10: note = Description of sequence: Splice site sequence
taggtgagta

SEQ ID NO: 2597 - RNA, 10 nt, synthetic construct
  source 1..10: mol_type = other RNA
  misc_feature 1..10: note = Description of sequence: Splice site sequence
taggtgagtc

SEQ ID NO: 2598 - RNA, 10 nt, synthetic construct
  source 1..10: mol_type = other RNA
  misc_feature 1..10: note = Description of sequence: Splice site sequence
taggtgagtg

SEQ ID NO: 2599 - RNA, 10 nt, synthetic construct
  source 1..10: mol_type = other RNA
  misc_feature 1..10: note = Description of sequence: Splice site sequence
taggtgatca

SEQ ID NO: 2600 - RNA, 10 nt, synthetic construct
  source 1..10: mol_type = other RNA
  misc_feature 1..10: note = Description of sequence: Splice site sequence
taggtgattc

SEQ ID NO: 2601 - RNA, 10 nt, synthetic construct
  source 1..10: mol_type = other RNA
  misc_feature 1..10: note = Description of sequence: Splice site sequence
taggtgattt

SEQ ID NO: 2602 - RNA, 10 nt, synthetic construct
  source 1..10: mol_type = other RNA
  misc_feature 1..10: note = Description of sequence: Splice site sequence
taggtgcata

SEQ ID NO: 2603 - RNA, 10 nt, synthetic construct
  source 1..10: mol_type = other RNA
  misc_feature 1..10: note = Description of sequence: Splice site sequence
taggtgcatc

SEQ ID NO: 2604 - RNA, 10 nt, synthetic construct
  source 1..10: mol_type = other RNA
  misc_feature 1..10: note = Description of sequence: Splice site sequence
taggtgccgt

SEQ ID NO: 2605 - RNA, 10 nt, synthetic construct
  source 1..10: mol_type = other RNA
  misc_feature 1..10: note = Description of sequence: Splice site sequence
taggtgcctg

SEQ ID NO: 2606 - RNA, 10 nt, synthetic construct
  source 1..10: mol_type = other RNA
  misc_feature 1..10: note = Description of sequence: Splice site sequence
taggtgcgca

SEQ ID NO: 2607 - RNA, 10 nt, synthetic construct
  source 1..10: mol_type = other RNA
  misc_feature 1..10: note = Description of sequence: Splice site sequence
taggtgcgta

SEQ ID NO: 2608 - RNA, 10 nt, synthetic construct
  source 1..10: mol_type = other RNA
  misc_feature 1..10: note = Description of sequence: Splice site sequence
taggtgcgtg

SEQ ID NO: 2609 - RNA, 10 nt, synthetic construct
  source 1..10: mol_type = other RNA
  misc_feature 1..10: note = Description of sequence: Splice site sequence
taggtgctga

SEQ ID NO: 2610 - RNA, 10 nt, synthetic construct
  source 1..10: mol_type = other RNA
  misc_feature 1..10: note = Description of sequence: Splice site sequence
taggtggata

SEQ ID NO: 2611 - RNA, 10 nt, synthetic construct
  source 1..10: mol_type = other RNA
  misc_feature 1..10: note = Description of sequence: Splice site sequence
taggtgggaa

SEQ ID NO: 2612 - RNA, 10 nt, synthetic construct
  source 1..10: mol_type = other RNA
  misc_feature 1..10: note = Description of sequence: Splice site sequence
taggtgggac

SEQ ID NO: 2613 - RNA, 10 nt, synthetic construct
  source 1..10: mol_type = other RNA
  misc_feature 1..10: note = Description of sequence: Splice site sequence
taggtgggag

SEQ ID NO: 2614 - RNA, 10 nt, synthetic construct
  source 1..10: mol_type = other RNA
  misc_feature 1..10: note = Description of sequence: Splice site sequence
taggtgggat

SEQ ID NO: 2615 - RNA, 10 nt, synthetic construct
  source 1..10: mol_type = other RNA
  misc_feature 1..10: note = Description of sequence: Splice site sequence
taggtgggcc

SEQ ID NO: 2616 - RNA, 10 nt, synthetic construct
  source 1..10: mol_type = other RNA
  misc_feature 1..10: note = Description of sequence: Splice site sequence
taggtgggct

SEQ ID NO: 2617 - RNA, 10 nt, synthetic construct
  source 1..10: mol_type = other RNA
  misc_feature 1..10: note = Description of sequence: Splice site sequence
taggtgggtt

SEQ ID NO: 2618 - RNA, 10 nt, synthetic construct
  source 1..10: mol_type = other RNA
  misc_feature 1..10: note = Description of sequence: Splice site sequence
taggtggtgt

SEQ ID NO: 2619 - RNA, 10 nt, synthetic construct
  source 1..10: mol_type = other RNA
  misc_feature 1..10: note = Description of sequence: Splice site sequence
taggtgtaaa

SEQ ID NO: 2620 - RNA, 10 nt, synthetic construct
  source 1..10: mol_type = other RNA
  misc_feature 1..10: note = Description of sequence: Splice site sequence
taggtgtgaa

SEQ ID NO: 2621 - RNA, 10 nt, synthetic construct
  source 1..10: mol_type = other RNA
  misc_feature 1..10: note = Description of sequence: Splice site sequence
taggtgtgag

SEQ ID NO: 2622 - RNA, 10 nt, synthetic construct
  source 1..10: mol_type = other RNA
  misc_feature 1..10: note = Description of sequence: Splice site sequence
taggtgtgca

SEQ ID NO: 2623 - RNA, 10 nt, synthetic construct
  source 1..10: mol_type = other RNA
  misc_feature 1..10: note = Description of sequence: Splice site sequence
taggtgtgcc

SEQ ID NO: 2624 - RNA, 10 nt, synthetic construct
  source 1..10: mol_type = other RNA
  misc_feature 1..10: note = Description of sequence: Splice site sequence
taggtgtgcg

SEQ ID NO: 2625 - RNA, 10 nt, synthetic construct
  source 1..10: mol_type = other RNA
  misc_feature 1..10: note = Description of sequence: Splice site sequence
taggtgtggt

SEQ ID NO: 2626 - RNA, 10 nt, synthetic construct
  source 1..10: mol_type = other RNA
  misc_feature 1..10: note = Description of sequence: Splice site sequence
taggtgtgta

SEQ ID NO: 2627 - RNA, 10 nt, synthetic construct
  source 1..10: mol_type = other RNA
  misc_feature 1..10: note = Description of sequence: Splice site sequence
taggtgtgtg

SEQ ID NO: 2628 - RNA, 10 nt, synthetic construct
  source 1..10: mol_type = other RNA
  misc_feature 1..10: note = Description of sequence: Splice site sequence
taggtgttgg

SEQ ID NO: 2629 - RNA, 10 nt, synthetic construct
  source 1..10: mol_type = other RNA
  misc_feature 1..10: note = Description of sequence: Splice site sequence
taggttaagc

SEQ ID NO: 2630 - RNA, 10 nt, synthetic construct
  source 1..10: mol_type = other RNA
  misc_feature 1..10: note = Description of sequence: Splice site sequence
taggttagac

SEQ ID NO: 2631 - RNA, 10 nt, synthetic construct
  source 1..10: mol_type = other RNA
  misc_feature 1..10: note = Description of sequence: Splice site sequence
taggttagcc

SEQ ID NO: 2632 - RNA, 10 nt, synthetic construct
  source 1..10: mol_type = other RNA
  misc_feature 1..10: note = Description of sequence: Splice site sequence
taggttaggc

SEQ ID NO: 2633 - RNA, 10 nt, synthetic construct
  source 1..10: mol_type = other RNA
  misc_feature 1..10: note = Description of sequence: Splice site sequence
taggttagta

SEQ ID NO: 2634 - RNA, 10 nt, synthetic construct
  source 1..10: mol_type = other RNA
  misc_feature 1..10: note = Description of sequence: Splice site sequence
taggttagtc

SEQ ID NO: 2635 - RNA, 10 nt, synthetic construct
  source 1..10: mol_type = other RNA
  misc_feature 1..10: note = Description of sequence: Splice site sequence
taggttagtg

SEQ ID NO: 2636 - RNA, 10 nt, synthetic construct
  source 1..10: mol_type = other RNA
  misc_feature 1..10: note = Description of sequence: Splice site sequence
taggttcccc

SEQ ID NO: 2637 - RNA, 10 nt, synthetic construct
  source 1..10: mol_type = other RNA
  misc_feature 1..10: note = Description of sequence: Splice site sequence
taggttctac

SEQ ID NO: 2638 - RNA, 10 nt, synthetic construct
  source 1..10: mol_type = other RNA
  misc_feature 1..10: note = Description of sequence: Splice site sequence
taggttggta

SEQ ID NO: 2639 - RNA, 10 nt, synthetic construct
  source 1..10: mol_type = other RNA
  misc_feature 1..10: note = Description of sequence: Splice site sequence
taggttggtt

SEQ ID NO: 2640 - RNA, 10 nt, synthetic construct
  source 1..10: mol_type = other RNA
  misc_feature 1..10: note = Description of sequence: Splice site sequence
taggttgtcc

SEQ ID NO: 2641 - RNA, 10 nt, synthetic construct
  source 1..10: mol_type = other RNA
  misc_feature 1..10: note = Description of sequence: Splice site sequence
taggtttatt

SEQ ID NO: 2642 - RNA, 10 nt, synthetic construct
  source 1..10: mol_type = other RNA
  misc_feature 1..10: note = Description of sequence: Splice site sequence
taggtttgcc

SEQ ID NO: 2643 - RNA, 10 nt, synthetic construct
  source 1..10: mol_type = other RNA
  misc_feature 1..10: note = Description of sequence: Splice site sequence
taggtttgta

SEQ ID NO: 2644 - RNA, 10 nt, synthetic construct
  source 1..10: mol_type = other RNA
  misc_feature 1..10: note = Description of sequence: Splice site sequence
taggtttgtc

SEQ ID NO: 2645 - RNA, 10 nt, synthetic construct
  source 1..10: mol_type = other RNA
  misc_feature 1..10: note = Description of sequence: Splice site sequence
taggtttgtg

SEQ ID NO: 2646 - RNA, 10 nt, synthetic construct
  source 1..10: mol_type = other RNA
  misc_feature 1..10: note = Description of sequence: Splice site sequence
taggtttgtt

SEQ ID NO: 2647 - RNA, 10 nt, synthetic construct
  source 1..10: mol_type = other RNA
  misc_feature 1..10: note = Description of sequence: Splice site sequence
taggtttttc

SEQ ID NO: 2648 - RNA, 10 nt, synthetic construct
  source 1..10: mol_type = other RNA
  misc_feature 1..10: note = Description of sequence: Splice site sequence
taggtttttg

SEQ ID NO: 2649 - RNA, 10 nt, synthetic construct
  source 1..10: mol_type = other RNA
  misc_feature 1..10: note = Description of sequence: Splice site sequence
tatgtaagaa

SEQ ID NO: 2650 - RNA, 10 nt, synthetic construct
  source 1..10: mol_type = other RNA
  misc_feature 1..10: note = Description of sequence: Splice site sequence
tatgtaagat

SEQ ID NO: 2651 - RNA, 10 nt, synthetic construct
  source 1..10: mol_type = other RNA
  misc_feature 1..10: note = Description of sequence: Splice site sequence
tatgtaagca

SEQ ID NO: 2652 - RNA, 10 nt, synthetic construct
  source 1..10: mol_type = other RNA
  misc_feature 1..10: note = Description of sequence: Splice site sequence
tatgtaagcc

SEQ ID NO: 2653 - RNA, 10 nt, synthetic construct
  source 1..10: mol_type = other RNA
  misc_feature 1..10: note = Description of sequence: Splice site sequence
tatgtaagta

SEQ ID NO: 2654 - RNA, 10 nt, synthetic construct
  source 1..10: mol_type = other RNA
  misc_feature 1..10: note = Description of sequence: Splice site sequence
tatgtaagtc

SEQ ID NO: 2655 - RNA, 10 nt, synthetic construct
  source 1..10: mol_type = other RNA
  misc_feature 1..10: note = Description of sequence: Splice site sequence
tatgtaagtg

SEQ ID NO: 2656 - RNA, 10 nt, synthetic construct
  source 1..10: mol_type = other RNA
  misc_feature 1..10: note = Description of sequence: Splice site sequence
tatgtaagtt

SEQ ID NO: 2657 - RNA, 10 nt, synthetic construct
  source 1..10: mol_type = other RNA
  misc_feature 1..10: note = Description of sequence: Splice site sequence
tatgtacgtg

SEQ ID NO: 2658 - RNA, 10 nt, synthetic construct
  source 1..10: mol_type = other RNA
  misc_feature 1..10: note = Description of sequence: Splice site sequence
tatgtacgtt

SEQ ID NO: 2659 - RNA, 10 nt, synthetic construct
  source 1..10: mol_type = other RNA
  misc_feature 1..10: note = Description of sequence: Splice site sequence
tatgtaggtc

SEQ ID NO: 2660 - RNA, 10 nt, synthetic construct
  source 1..10: mol_type = other RNA
  misc_feature 1..10: note = Description of sequence: Splice site sequence
tatgtaggtt

SEQ ID NO: 2661 - RNA, 10 nt, synthetic construct
  source 1..10: mol_type = other RNA
  misc_feature 1..10: note = Description of sequence: Splice site sequence
tatgtatcct

SEQ ID NO: 2662 - RNA, 10 nt, synthetic construct
  source 1..10: mol_type = other RNA
  misc_feature 1..10: note = Description of sequence: Splice site sequence
tatgtatctc

SEQ ID NO: 2663 - RNA, 10 nt, synthetic construct
  source 1..10: mol_type = other RNA
  misc_feature 1..10: note = Description of sequence: Splice site sequence
tatgtatgta

SEQ ID NO: 2664 - RNA, 10 nt, synthetic construct
  source 1..10: mol_type = other RNA
  misc_feature 1..10: note = Description of sequence: Splice site sequence
tatgtatgtc

SEQ ID NO: 2665 - RNA, 10 nt, synthetic construct
  source 1..10: mol_type = other RNA
  misc_feature 1..10: note = Description of sequence: Splice site sequence
tatgtatgtg

SEQ ID NO: 2666 - RNA, 10 nt, synthetic construct
  source 1..10: mol_type = other RNA
  misc_feature 1..10: note = Description of sequence: Splice site sequence
tatgtattat

SEQ ID NO: 2667 - RNA, 10 nt, synthetic construct
  source 1..10: mol_type = other RNA
  misc_feature 1..10: note = Description of sequence: Splice site sequence
tatgtcagaa

SEQ ID NO: 2668 - RNA, 10 nt, synthetic construct
  source 1..10: mol_type = other RNA
  misc_feature 1..10: note = Description of sequence: Splice site sequence
tatgtctgta

SEQ ID NO: 2669 - RNA, 10 nt, synthetic construct
  source 1..10: mol_type = other RNA
  misc_feature 1..10: note = Description of sequence: Splice site sequence
tatgtgaata

SEQ ID NO: 2670 - RNA, 10 nt, synthetic construct
  source 1..10: mol_type = other RNA
  misc_feature 1..10: note = Description of sequence: Splice site sequence
tatgtgacag

SEQ ID NO: 2671 - RNA, 10 nt, synthetic construct
  source 1..10: mol_type = other RNA
  misc_feature 1..10: note = Description of sequence: Splice site sequence
tatgtgagta

SEQ ID NO: 2672 - RNA, 10 nt, synthetic construct
  source 1..10: mol_type = other RNA
  misc_feature 1..10: note = Description of sequence: Splice site sequence
tatgtgagtg

SEQ ID NO: 2673 - RNA, 10 nt, synthetic construct
  source 1..10: mol_type = other RNA
  misc_feature 1..10: note = Description of sequence: Splice site sequence
tatgtgagtt

SEQ ID NO: 2674 - RNA, 10 nt, synthetic construct
  source 1..10: mol_type = other RNA
  misc_feature 1..10: note = Description of sequence: Splice site sequence
tatgtgggca

SEQ ID NO: 2675 - RNA, 10 nt, synthetic construct
  source 1..10: mol_type = other RNA
  misc_feature 1..10: note = Description of sequence: Splice site sequence
tatgtgtgta

SEQ ID NO: 2676 - RNA, 10 nt, synthetic construct
  source 1..10: mol_type = other RNA
  misc_feature 1..10: note = Description of sequence: Splice site sequence
tatgtgttta

SEQ ID NO: 2677 - RNA, 10 nt, synthetic construct
  source 1..10: mol_type = other RNA
  misc_feature 1..10: note = Description of sequence: Splice site sequence
tatgttttgt

SEQ ID NO: 2678 - RNA, 10 nt, synthetic construct
  source 1..10: mol_type = other RNA
  misc_feature 1..10: note = Description of sequence: Splice site sequence
tcagcgacat

SEQ ID NO: 2679 - RNA, 10 nt, synthetic construct
  source 1..10: mol_type = other RNA
  misc_feature 1..10: note = Description of sequence: Splice site sequence
tcagtaaaat

SEQ ID NO: 2680 - RNA, 10 nt, synthetic construct
  source 1..10: mol_type = other RNA
  misc_feature 1..10: note = Description of sequence: Splice site sequence
tcagtaaata

SEQ ID NO: 2681 - RNA, 10 nt, synthetic construct
  source 1..10: mol_type = other RNA
  misc_feature 1..10: note = Description of sequence: Splice site sequence
tcagtaactg

SEQ ID NO: 2682 - RNA, 10 nt, synthetic construct
  source 1..10: mol_type = other RNA
  misc_feature 1..10: note = Description of sequence: Splice site sequence
tcagtaagaa

SEQ ID NO: 2683 - RNA, 10 nt, synthetic construct
  source 1..10: mol_type = other RNA
  misc_feature 1..10: note = Description of sequence: Splice site sequence
tcagtaagag

SEQ ID NO: 2684 - RNA, 10 nt, synthetic construct
  source 1..10: mol_type = other RNA
  misc_feature 1..10: note = Description of sequence: Splice site sequence
tcagtaagat

SEQ ID NO: 2685 - RNA, 10 nt, synthetic construct
  source 1..10: mol_type = other RNA
  misc_feature 1..10: note = Description of sequence: Splice site sequence
tcagtaagca

SEQ ID NO: 2686 - RNA, 10 nt, synthetic construct
  source 1..10: mol_type = other RNA
  misc_feature 1..10: note = Description of sequence: Splice site sequence
tcagtaagcc

SEQ ID NO: 2687 - RNA, 10 nt, synthetic construct
  source 1..10: mol_type = other RNA
  misc_feature 1..10: note = Description of sequence: Splice site sequence
tcagtaagct

SEQ ID NO: 2688 - RNA, 10 nt, synthetic construct
  source 1..10: mol_type = other RNA
  misc_feature 1..10: note = Description of sequence: Splice site sequence
tcagtaaggg

SEQ ID NO: 2689 - RNA, 10 nt, synthetic construct
  source 1..10: mol_type = other RNA
  misc_feature 1..10: note = Description of sequence: Splice site sequence
tcagtaagta

SEQ ID NO: 2690 - RNA, 10 nt, synthetic construct
  source 1..10: mol_type = other RNA
  misc_feature 1..10: note = Description of sequence: Splice site sequence
tcagtaagtc

SEQ ID NO: 2691 - RNA, 10 nt, synthetic construct
  source 1..10: mol_type = other RNA
  misc_feature 1..10: note = Description of sequence: Splice site sequence
tcagtaagtg

SEQ ID NO: 2692 - RNA, 10 nt, synthetic construct
  source 1..10: mol_type = other RNA
  misc_feature 1..10: note = Description of sequence: Splice site sequence
tcagtaagtt

SEQ ID NO: 2693 - RNA, 10 nt, synthetic construct
  source 1..10: mol_type = other RNA
  misc_feature 1..10: note = Description of sequence: Splice site sequence
tcagtatctt

SEQ ID NO: 2694 - RNA, 10 nt, synthetic construct
  source 1..10: mol_type = other RNA
  misc_feature 1..10: note = Description of sequence: Splice site sequence
tcagtatgga

SEQ ID NO: 2695 - RNA, 10 nt, synthetic construct
  source 1..10: mol_type = other RNA
  misc_feature 1..10: note = Description of sequence: Splice site sequence
tcagtatggt

SEQ ID NO: 2696 - RNA, 10 nt, synthetic construct
  source 1..10: mol_type = other RNA
  misc_feature 1..10: note = Description of sequence: Splice site sequence
tcagtcccca

SEQ ID NO: 2697 - RNA, 10 nt, synthetic construct
  source 1..10: mol_type = other RNA
  misc_feature 1..10: note = Description of sequence: Splice site sequence
tcagtgagca

SEQ ID NO: 2698 - RNA, 10 nt, synthetic construct
  source 1..10: mol_type = other RNA
  misc_feature 1..10: note = Description of sequence: Splice site sequence
tcagtgagct

SEQ ID NO: 2699 - RNA, 10 nt, synthetic construct
  source 1..10: mol_type = other RNA
  misc_feature 1..10: note = Description of sequence: Splice site sequence
tcagtgagta

SEQ ID NO: 2700 - RNA, 10 nt, synthetic construct
  source 1..10: mol_type = other RNA
  misc_feature 1..10: note = Description of sequence: Splice site sequence
tcagtgagtg

SEQ ID NO: 2701 - RNA, 10 nt, synthetic construct
  source 1..10: mol_type = other RNA
  misc_feature 1..10: note = Description of sequence: Splice site sequence
tcagtgagtt

SEQ ID NO: 2702 - RNA, 10 nt, synthetic construct
  source 1..10: mol_type = other RNA
  misc_feature 1..10: note = Description of sequence: Splice site sequence
tcagtgattg

SEQ ID NO: 2703 - RNA, 10 nt, synthetic construct
  source 1..10: mol_type = other RNA
  misc_feature 1..10: note = Description of sequence: Splice site sequence
tcagtgggtg

SEQ ID NO: 2704 - RNA, 10 nt, synthetic construct
  source 1..10: mol_type = other RNA
  misc_feature 1..10: note = Description of sequence: Splice site sequence
tcagttgagc

SEQ ID NO: 2705 - RNA, 10 nt, synthetic construct
  source 1..10: mol_type = other RNA
  misc_feature 1..10: note = Description of sequence: Splice site sequence
tcagttgatt

SEQ ID NO: 2706 - RNA, 10 nt, synthetic construct
  source 1..10: mol_type = other RNA
  misc_feature 1..10: note = Description of sequence: Splice site sequence
tcagtttagt

SEQ ID NO: 2707 - RNA, 10 nt, synthetic construct
  source 1..10: mol_type = other RNA
  misc_feature 1..10: note = Description of sequence: Splice site sequence
tccgtaagca

SEQ ID NO: 2708 - RNA, 10 nt, synthetic construct
  source 1..10: mol_type = other RNA
  misc_feature 1..10: note = Description of sequence: Splice site sequence
tccgtaagct

SEQ ID NO: 2709 - RNA, 10 nt, synthetic construct
  source 1..10: mol_type = other RNA
  misc_feature 1..10: note = Description of sequence: Splice site sequence
tccgtaagtc

SEQ ID NO: 2710 - RNA, 10 nt, synthetic construct
  source 1..10: mol_type = other RNA
  misc_feature 1..10: note = Description of sequence: Splice site sequence
tccgtaagtg

SEQ ID NO: 2711 - RNA, 10 nt, synthetic construct
  source 1..10: mol_type = other RNA
  misc_feature 1..10: note = Description of sequence: Splice site sequence
tccgtaatag

SEQ ID NO: 2712 - RNA, 10 nt, synthetic construct
  source 1..10: mol_type = other RNA
  misc_feature 1..10: note = Description of sequence: Splice site sequence
tccgtactta

SEQ ID NO: 2713 - RNA, 10 nt, synthetic construct
  source 1..10: mol_type = other RNA
  misc_feature 1..10: note = Description of sequence: Splice site sequence
tccgtatgta

SEQ ID NO: 2714 - RNA, 10 nt, synthetic construct
  source 1..10: mol_type = other RNA
  misc_feature 1..10: note = Description of sequence: Splice site sequence
tccgtatgtt

SEQ ID NO: 2715 - RNA, 10 nt, synthetic construct
  source 1..10: mol_type = other RNA
  misc_feature 1..10: note = Description of sequence: Splice site sequence
tccgtgagat

SEQ ID NO: 2716 - RNA, 10 nt, synthetic construct
  source 1..10: mol_type = other RNA
  misc_feature 1..10: note = Description of sequence: Splice site sequence
tccgtgagtc

SEQ ID NO: 2717 - RNA, 10 nt, synthetic construct
  source 1..10: mol_type = other RNA
  misc_feature 1..10: note = Description of sequence: Splice site sequence
tcggtaaatt

SEQ ID NO: 2718 - RNA, 10 nt, synthetic construct
  source 1..10: mol_type = other RNA
  misc_feature 1..10: note = Description of sequence: Splice site sequence
tcggtaagag

SEQ ID NO: 2719 - RNA, 10 nt, synthetic construct
  source 1..10: mol_type = other RNA
  misc_feature 1..10: note = Description of sequence: Splice site sequence
tcggtaagct

SEQ ID NO: 2720 - RNA, 10 nt, synthetic construct
  source 1..10: mol_type = other RNA
  misc_feature 1..10: note = Description of sequence: Splice site sequence
tcggtacatc

SEQ ID NO: 2721 - RNA, 10 nt, synthetic construct
  source 1..10: mol_type = other RNA
  misc_feature 1..10: note = Description of sequence: Splice site sequence
tcggtactcc

SEQ ID NO: 2722 - RNA, 10 nt, synthetic construct
  source 1..10: mol_type = other RNA
  misc_feature 1..10: note = Description of sequence: Splice site sequence
tcggtagacc

SEQ ID NO: 2723 - RNA, 10 nt, synthetic construct
  source 1..10: mol_type = other RNA
  misc_feature 1..10: note = Description of sequence: Splice site sequence
tcggtaggtt

SEQ ID NO: 2724 - RNA, 10 nt, synthetic construct
  source 1..10: mol_type = other RNA
  misc_feature 1..10: note = Description of sequence: Splice site sequence
tcggtagtaa

SEQ ID NO: 2725 - RNA, 10 nt, synthetic construct
  source 1..10: mol_type = other RNA
  misc_feature 1..10: note = Description of sequence: Splice site sequence
tcggtatgtg

SEQ ID NO: 2726 - RNA, 10 nt, synthetic construct
  source 1..10: mol_type = other RNA
  misc_feature 1..10: note = Description of sequence: Splice site sequence
tcggtatgtt

SEQ ID NO: 2727 - RNA, 10 nt, synthetic construct
  source 1..10: mol_type = other RNA
  misc_feature 1..10: note = Description of sequence: Splice site sequence
tcggtattga

SEQ ID NO: 2728 - RNA, 10 nt, synthetic construct
  source 1..10: mol_type = other RNA
  misc_feature 1..10: note = Description of sequence: Splice site sequence
tcggtcagta

SEQ ID NO: 2729 - RNA, 10 nt, synthetic construct
  source 1..10: mol_type = other RNA
  misc_feature 1..10: note = Description of sequence: Splice site sequence
tcggtcttag

SEQ ID NO: 2730 - RNA, 10 nt, synthetic construct
  source 1..10: mol_type = other RNA
  misc_feature 1..10: note = Description of sequence: Splice site sequence
tcggtgaagt

SEQ ID NO: 2731 - RNA, 10 nt, synthetic construct
  source 1..10: mol_type = other RNA
  misc_feature 1..10: note = Description of sequence: Splice site sequence
tcggtgagaa

SEQ ID NO: 2732 - RNA, 10 nt, synthetic construct
  source 1..10: mol_type = other RNA
  misc_feature 1..10: note = Description of sequence: Splice site sequence
tcggtgagca

SEQ ID NO: 2733 - RNA, 10 nt, synthetic construct
  source 1..10: mol_type = other RNA
  misc_feature 1..10: note = Description of sequence: Splice site sequence
tcggtgaggc

SEQ ID NO: 2734 - RNA, 10 nt, synthetic construct
  source 1..10: mol_type = other RNA
  misc_feature 1..10: note = Description of sequence: Splice site sequence
tcggtgagta

SEQ ID NO: 2735 - RNA, 10 nt, synthetic construct
  source 1..10: mol_type = other RNA
  misc_feature 1..10: note = Description of sequence: Splice site sequence
tcggtgcgct

SEQ ID NO: 2736 - RNA, 10 nt, synthetic construct
  source 1..10: mol_type = other RNA
  misc_feature 1..10: note = Description of sequence: Splice site sequence
tcggtgcttt

SEQ ID NO: 2737 - RNA, 10 nt, synthetic construct
  source 1..10: mol_type = other RNA
  misc_feature 1..10: note = Description of sequence: Splice site sequence
tcggtggttt

SEQ ID NO: 2738 - RNA, 10 nt, synthetic construct
  source 1..10: mol_type = other RNA
  misc_feature 1..10: note = Description of sequence: Splice site sequence
tcggttagct

SEQ ID NO: 2739 - RNA, 10 nt, synthetic construct
  source 1..10: mol_type = other RNA
  misc_feature 1..10: note = Description of sequence: Splice site sequence
tctgtaaaag

SEQ ID NO: 2740 - RNA, 10 nt, synthetic construct
  source 1..10: mol_type = other RNA
  misc_feature 1..10: note = Description of sequence: Splice site sequence
tctgtaagaa

SEQ ID NO: 2741 - RNA, 10 nt, synthetic construct
  source 1..10: mol_type = other RNA
  misc_feature 1..10: note = Description of sequence: Splice site sequence
tctgtaagat

SEQ ID NO: 2742 - RNA, 10 nt, synthetic construct
  source 1..10: mol_type = other RNA
  misc_feature 1..10: note = Description of sequence: Splice site sequence
tctgtaagca

SEQ ID NO: 2743 - RNA, 10 nt, synthetic construct
  source 1..10: mol_type = other RNA
  misc_feature 1..10: note = Description of sequence: Splice site sequence
tctgtaagct

SEQ ID NO: 2744 - RNA, 10 nt, synthetic construct
  source 1..10: mol_type = other RNA
  misc_feature 1..10: note = Description of sequence: Splice site sequence
tctgtaagta

SEQ ID NO: 2745 - RNA, 10 nt, synthetic construct
  source 1..10: mol_type = other RNA
  misc_feature 1..10: note = Description of sequence: Splice site sequence
tctgtaagtc

SEQ ID NO: 2746 - RNA, 10 nt, synthetic construct
  source 1..10: mol_type = other RNA
  misc_feature 1..10: note = Description of sequence: Splice site sequence
tctgtaagtg

SEQ ID NO: 2747 - RNA, 10 nt, synthetic construct
  source 1..10: mol_type = other RNA
  misc_feature 1..10: note = Description of sequence: Splice site sequence
tctgtaagtt

SEQ ID NO: 2748 - RNA, 10 nt, synthetic construct
  source 1..10: mol_type = other RNA
  misc_feature 1..10: note = Description of sequence: Splice site sequence
tctgtaataa

SEQ ID NO: 2749 - RNA, 10 nt, synthetic construct
  source 1..10: mol_type = other RNA
  misc_feature 1..10: note = Description of sequence: Splice site sequence
tctgtaatga

SEQ ID NO: 2750 - RNA, 10 nt, synthetic construct
  source 1..10: mol_type = other RNA
  misc_feature 1..10: note = Description of sequence: Splice site sequence
tctgtaatgt

SEQ ID NO: 2751 - RNA, 10 nt, synthetic construct
  source 1..10: mol_type = other RNA
  misc_feature 1..10: note = Description of sequence: Splice site sequence
tctgtaggta

SEQ ID NO: 2752 - RNA, 10 nt, synthetic construct
  source 1..10: mol_type = other RNA
  misc_feature 1..10: note = Description of sequence: Splice site sequence
tctgtaggtt

SEQ ID NO: 2753 - RNA, 10 nt, synthetic construct
  source 1..10: mol_type = other RNA
  misc_feature 1..10: note = Description of sequence: Splice site sequence
tctgtatata

SEQ ID NO: 2754 - RNA, 10 nt, synthetic construct
  source 1..10: mol_type = other RNA
  misc_feature 1..10: note = Description of sequence: Splice site sequence
tctgtatgac

SEQ ID NO: 2755 - RNA, 10 nt, synthetic construct
  source 1..10: mol_type = other RNA
  misc_feature 1..10: note = Description of sequence: Splice site sequence
tctgtatgta

SEQ ID NO: 2756 - RNA, 10 nt, synthetic construct
  source 1..10: mol_type = other RNA
  misc_feature 1..10: note = Description of sequence: Splice site sequence
tctgtcctcg

SEQ ID NO: 2757 - RNA, 10 nt, synthetic construct
  source 1..10: mol_type = other RNA
  misc_feature 1..10: note = Description of sequence: Splice site sequence
tctgtgagag

SEQ ID NO: 2758 - RNA, 10 nt, synthetic construct
  source 1..10: mol_type = other RNA
  misc_feature 1..10: note = Description of sequence: Splice site sequence
tctgtgagct

SEQ ID NO: 2759 - RNA, 10 nt, synthetic construct
  source 1..10: mol_type = other RNA
  misc_feature 1..10: note = Description of sequence: Splice site sequence
tctgtgagga

SEQ ID NO: 2760 - RNA, 10 nt, synthetic construct
  source 1..10: mol_type = other RNA
  misc_feature 1..10: note = Description of sequence: Splice site sequence
tctgtgagta

SEQ ID NO: 2761 - RNA, 10 nt, synthetic construct
  source 1..10: mol_type = other RNA
  misc_feature 1..10: note = Description of sequence: Splice site sequence
tctgtgagtc

SEQ ID NO: 2762 - RNA, 10 nt, synthetic construct
  source 1..10: mol_type = other RNA
  misc_feature 1..10: note = Description of sequence: Splice site sequence
tctgtgagtg

SEQ ID NO: 2763 - RNA, 10 nt, synthetic construct
  source 1..10: mol_type = other RNA
  misc_feature 1..10: note = Description of sequence: Splice site sequence
tctgtgagtt

SEQ ID NO: 2764 - RNA, 10 nt, synthetic construct
  source 1..10: mol_type = other RNA
  misc_feature 1..10: note = Description of sequence: Splice site sequence
tctgtgcgta

SEQ ID NO: 2765 - RNA, 10 nt, synthetic construct
  source 1..10: mol_type = other RNA
  misc_feature 1..10: note = Description of sequence: Splice site sequence
tctgtgtgag

SEQ ID NO: 2766 - RNA, 10 nt, synthetic construct
  source 1..10: mol_type = other RNA
  misc_feature 1..10: note = Description of sequence: Splice site sequence
tgagtaactt

SEQ ID NO: 2767 - RNA, 10 nt, synthetic construct
  source 1..10: mol_type = other RNA
  misc_feature 1..10: note = Description of sequence: Splice site sequence
tgagtaagat

SEQ ID NO: 2768 - RNA, 10 nt, synthetic construct
  source 1..10: mol_type = other RNA
  misc_feature 1..10: note = Description of sequence: Splice site sequence
tgagtaagca

SEQ ID NO: 2769 - RNA, 10 nt, synthetic construct
  source 1..10: mol_type = other RNA
  misc_feature 1..10: note = Description of sequence: Splice site sequence
tgagtaagct

SEQ ID NO: 2770 - RNA, 10 nt, synthetic construct
  source 1..10: mol_type = other RNA
  misc_feature 1..10: note = Description of sequence: Splice site sequence
tgagtaaggc

SEQ ID NO: 2771 - RNA, 10 nt, synthetic construct
  source 1..10: mol_type = other RNA
  misc_feature 1..10: note = Description of sequence: Splice site sequence
tgagtaaggt

SEQ ID NO: 2772 - RNA, 10 nt, synthetic construct
  source 1..10: mol_type = other RNA
  misc_feature 1..10: note = Description of sequence: Splice site sequence
tgagtaagta

SEQ ID NO: 2773 - RNA, 10 nt, synthetic construct
  source 1..10: mol_type = other RNA
  misc_feature 1..10: note = Description of sequence: Splice site sequence
tgagtaagtc

SEQ ID NO: 2774 - RNA, 10 nt, synthetic construct
  source 1..10: mol_type = other RNA
  misc_feature 1..10: note = Description of sequence: Splice site sequence
tgagtaagtg

SEQ ID NO: 2775 - RNA, 10 nt, synthetic construct
  source 1..10: mol_type = other RNA
  misc_feature 1..10: note = Description of sequence: Splice site sequence
tgagtaagtt

SEQ ID NO: 2776 - RNA, 10 nt, synthetic construct
  source 1..10: mol_type = other RNA
  misc_feature 1..10: note = Description of sequence: Splice site sequence
tgagtaatcc

SEQ ID NO: 2777 - RNA, 10 nt, synthetic construct
  source 1..10: mol_type = other RNA
  misc_feature 1..10: note = Description of sequence: Splice site sequence
tgagtaatta

SEQ ID NO: 2778 - RNA, 10 nt, synthetic construct
  source 1..10: mol_type = other RNA
  misc_feature 1..10: note = Description of sequence: Splice site sequence
tgagtacagt

SEQ ID NO: 2779 - RNA, 10 nt, synthetic construct
  source 1..10: mol_type = other RNA
  misc_feature 1..10: note = Description of sequence: Splice site sequence
tgagtacgta

SEQ ID NO: 2780 - RNA, 10 nt, synthetic construct
  source 1..10: mol_type = other RNA
  misc_feature 1..10: note = Description of sequence: Splice site sequence
tgagtacgtt

SEQ ID NO: 2781 - RNA, 10 nt, synthetic construct
  source 1..10: mol_type = other RNA
  misc_feature 1..10: note = Description of sequence: Splice site sequence
tgagtactgt

SEQ ID NO: 2782 - RNA, 10 nt, synthetic construct
  source 1..10: mol_type = other RNA
  misc_feature 1..10: note = Description of sequence: Splice site sequence
tgagtagctg

SEQ ID NO: 2783 - RNA, 10 nt, synthetic construct
  source 1..10: mol_type = other RNA
  misc_feature 1..10: note = Description of sequence: Splice site sequence
tgagtaggta

SEQ ID NO: 2784 - RNA, 10 nt, synthetic construct
  source 1..10: mol_type = other RNA
  misc_feature 1..10: note = Description of sequence: Splice site sequence
tgagtataaa

SEQ ID NO: 2785 - RNA, 10 nt, synthetic construct
  source 1..10: mol_type = other RNA
  misc_feature 1..10: note = Description of sequence: Splice site sequence
tgagtatgct

SEQ ID NO: 2786 - RNA, 10 nt, synthetic construct
  source 1..10: mol_type = other RNA
  misc_feature 1..10: note = Description of sequence: Splice site sequence
tgagtatgga

SEQ ID NO: 2787 - RNA, 10 nt, synthetic construct
  source 1..10: mol_type = other RNA
  misc_feature 1..10: note = Description of sequence: Splice site sequence
tgagtatgta

SEQ ID NO: 2788 - RNA, 10 nt, synthetic construct
  source 1..10: mol_type = other RNA
  misc_feature 1..10: note = Description of sequence: Splice site sequence
tgagtatgtc

SEQ ID NO: 2789 - RNA, 10 nt, synthetic construct
  source 1..10: mol_type = other RNA
  misc_feature 1..10: note = Description of sequence: Splice site sequence
tgagtatgtt

SEQ ID NO: 2790 - RNA, 10 nt, synthetic construct
  source 1..10: mol_type = other RNA
  misc_feature 1..10: note = Description of sequence: Splice site sequence
tgagtcagag

SEQ ID NO: 2791 - RNA, 10 nt, synthetic construct
  source 1..10: mol_type = other RNA
  misc_feature 1..10: note = Description of sequence: Splice site sequence
tgagtctacg

SEQ ID NO: 2792 - RNA, 10 nt, synthetic construct
  source 1..10: mol_type = other RNA
  misc_feature 1..10: note = Description of sequence: Splice site sequence
tgagtgaata

SEQ ID NO: 2793 - RNA, 10 nt, synthetic construct
  source 1..10: mol_type = other RNA
  misc_feature 1..10: note = Description of sequence: Splice site sequence
tgagtgaatt

SEQ ID NO: 2794 - RNA, 10 nt, synthetic construct
  source 1..10: mol_type = other RNA
  misc_feature 1..10: note = Description of sequence: Splice site sequence
tgagtgagaa

SEQ ID NO: 2795 - RNA, 10 nt, synthetic construct
  source 1..10: mol_type = other RNA
  misc_feature 1..10: note = Description of sequence: Splice site sequence
tgagtgagat

SEQ ID NO: 2796 - RNA, 10 nt, synthetic construct
  source 1..10: mol_type = other RNA
  misc_feature 1..10: note = Description of sequence: Splice site sequence
tgagtgagca

SEQ ID NO: 2797 - RNA, 10 nt, synthetic construct
  source 1..10: mol_type = other RNA
  misc_feature 1..10: note = Description of sequence: Splice site sequence
tgagtgagcc

SEQ ID NO: 2798 - RNA, 10 nt, synthetic construct
  source 1..10: mol_type = other RNA
  misc_feature 1..10: note = Description of sequence: Splice site sequence
tgagtgagga

SEQ ID NO: 2799 - RNA, 10 nt, synthetic construct
  source 1..10: mol_type = other RNA
  misc_feature 1..10: note = Description of sequence: Splice site sequence
tgagtgagta

SEQ ID NO: 2800 - RNA, 10 nt, synthetic construct
  source 1..10: mol_type = other RNA
  misc_feature 1..10: note = Description of sequence: Splice site sequence
tgagtgagtg

SEQ ID NO: 2801 - RNA, 10 nt, synthetic construct
  source 1..10: mol_type = other RNA
  misc_feature 1..10: note = Description of sequence: Splice site sequence
tgagtgagtt

SEQ ID NO: 2802 - RNA, 10 nt, synthetic construct
  source 1..10: mol_type = other RNA
  misc_feature 1..10: note = Description of sequence: Splice site sequence
tgagtgggaa

SEQ ID NO: 2803 - RNA, 10 nt, synthetic construct
  source 1..10: mol_type = other RNA
  misc_feature 1..10: note = Description of sequence: Splice site sequence
tgagttaaga

SEQ ID NO: 2804 - RNA, 10 nt, synthetic construct
  source 1..10: mol_type = other RNA
  misc_feature 1..10: note = Description of sequence: Splice site sequence
tgagttaatg

SEQ ID NO: 2805 - RNA, 10 nt, synthetic construct
  source 1..10: mol_type = other RNA
  misc_feature 1..10: note = Description of sequence: Splice site sequence
tgagttacgg

SEQ ID NO: 2806 - RNA, 10 nt, synthetic construct
  source 1..10: mol_type = other RNA
  misc_feature 1..10: note = Description of sequence: Splice site sequence
tgagttaggt

SEQ ID NO: 2807 - RNA, 10 nt, synthetic construct
  source 1..10: mol_type = other RNA
  misc_feature 1..10: note = Description of sequence: Splice site sequence
tgagttctat

SEQ ID NO: 2808 - RNA, 10 nt, synthetic construct
  source 1..10: mol_type = other RNA
  misc_feature 1..10: note = Description of sequence: Splice site sequence
tgagttggtt

SEQ ID NO: 2809 - RNA, 10 nt, synthetic construct
  source 1..10: mol_type = other RNA
  misc_feature 1..10: note = Description of sequence: Splice site sequence
tgagttgtag

SEQ ID NO: 2810 - RNA, 10 nt, synthetic construct
  source 1..10: mol_type = other RNA
  misc_feature 1..10: note = Description of sequence: Splice site sequence
tgagtttatc

SEQ ID NO: 2811 - RNA, 10 nt, synthetic construct
  source 1..10: mol_type = other RNA
  misc_feature 1..10: note = Description of sequence: Splice site sequence
tgcgtaagtc

SEQ ID NO: 2812 - RNA, 10 nt, synthetic construct
  source 1..10: mol_type = other RNA
  misc_feature 1..10: note = Description of sequence: Splice site sequence
tgcgtaagtg

SEQ ID NO: 2813 - RNA, 10 nt, synthetic construct
  source 1..10: mol_type = other RNA
  misc_feature 1..10: note = Description of sequence: Splice site sequence
tgcgtacggc

SEQ ID NO: 2814 - RNA, 10 nt, synthetic construct
  source 1..10: mol_type = other RNA
  misc_feature 1..10: note = Description of sequence: Splice site sequence
tgcgtacggg

SEQ ID NO: 2815 - RNA, 10 nt, synthetic construct
  source 1..10: mol_type = other RNA
  misc_feature 1..10: note = Description of sequence: Splice site sequence
tgcgtatgta

SEQ ID NO: 2816 - RNA, 10 nt, synthetic construct
  source 1..10: mol_type = other RNA
  misc_feature 1..10: note = Description of sequence: Splice site sequence
tgggcaagtc

SEQ ID NO: 2817 - RNA, 10 nt, synthetic construct
  source 1..10: mol_type = other RNA
  misc_feature 1..10: note = Description of sequence: Splice site sequence
tgggcaagtg

SEQ ID NO: 2818 - RNA, 10 nt, synthetic construct
  source 1..10: mol_type = other RNA
  misc_feature 1..10: note = Description of sequence: Splice site sequence
tgggcacatc

SEQ ID NO: 2819 - RNA, 10 nt, synthetic construct
  source 1..10: mol_type = other RNA
  misc_feature 1..10: note = Description of sequence: Splice site sequence
tgggccacgt

SEQ ID NO: 2820 - RNA, 10 nt, synthetic construct
  source 1..10: mol_type = other RNA
  misc_feature 1..10: note = Description of sequence: Splice site sequence
tgggccccgg

SEQ ID NO: 2821 - RNA, 10 nt, synthetic construct
  source 1..10: mol_type = other RNA
  misc_feature 1..10: note = Description of sequence: Splice site sequence
tgggtaaaat

SEQ ID NO: 2822 - RNA, 10 nt, synthetic construct
  source 1..10: mol_type = other RNA
  misc_feature 1..10: note = Description of sequence: Splice site sequence
tgggtaaagc

SEQ ID NO: 2823 - RNA, 10 nt, synthetic construct
  source 1..10: mol_type = other RNA
  misc_feature 1..10: note = Description of sequence: Splice site sequence
tgggtaaagg

SEQ ID NO: 2824 - RNA, 10 nt, synthetic construct
  source 1..10: mol_type = other RNA
  misc_feature 1..10: note = Description of sequence: Splice site sequence
tgggtaaagt

SEQ ID NO: 2825 - RNA, 10 nt, synthetic construct
  source 1..10: mol_type = other RNA
  misc_feature 1..10: note = Description of sequence: Splice site sequence
tgggtaaata

SEQ ID NO: 2826 - RNA, 10 nt, synthetic construct
  source 1..10: mol_type = other RNA
  misc_feature 1..10: note = Description of sequence: Splice site sequence
tgggtaaatg

SEQ ID NO: 2827 - RNA, 10 nt, synthetic construct
  source 1..10: mol_type = other RNA
  misc_feature 1..10: note = Description of sequence: Splice site sequence
tgggtaaatt

SEQ ID NO: 2828 - RNA, 10 nt, synthetic construct
  source 1..10: mol_type = other RNA
  misc_feature 1..10: note = Description of sequence: Splice site sequence
tgggtaacag

SEQ ID NO: 2829 - RNA, 10 nt, synthetic construct
  source 1..10: mol_type = other RNA
  misc_feature 1..10: note = Description of sequence: Splice site sequence
tgggtaacat

SEQ ID NO: 2830 - RNA, 10 nt, synthetic construct
  source 1..10: mol_type = other RNA
  misc_feature 1..10: note = Description of sequence: Splice site sequence
tgggtaacta

SEQ ID NO: 2831 - RNA, 10 nt, synthetic construct
  source 1..10: mol_type = other RNA
  misc_feature 1..10: note = Description of sequence: Splice site sequence
tgggtaactt

SEQ ID NO: 2832 - RNA, 10 nt, synthetic construct
  source 1..10: mol_type = other RNA
  misc_feature 1..10: note = Description of sequence: Splice site sequence
tgggtaagaa

SEQ ID NO: 2833 - RNA, 10 nt, synthetic construct
  source 1..10: mol_type = other RNA
  misc_feature 1..10: note = Description of sequence: Splice site sequence
tgggtaagac

SEQ ID NO: 2834 - RNA, 10 nt, synthetic construct
  source 1..10: mol_type = other RNA
  misc_feature 1..10: note = Description of sequence: Splice site sequence
tgggtaagag

SEQ ID NO: 2835 - RNA, 10 nt, synthetic construct
  source 1..10: mol_type = other RNA
  misc_feature 1..10: note = Description of sequence: Splice site sequence
tgggtaagat

SEQ ID NO: 2836 - RNA, 10 nt, synthetic construct
  source 1..10: mol_type = other RNA
  misc_feature 1..10: note = Description of sequence: Splice site sequence
tgggtaagca

SEQ ID NO: 2837 - RNA, 10 nt, synthetic construct
  source 1..10: mol_type = other RNA
  misc_feature 1..10: note = Description of sequence: Splice site sequence
tgggtaagcc

SEQ ID NO: 2838 - RNA, 10 nt, synthetic construct
  source 1..10: mol_type = other RNA
  misc_feature 1..10: note = Description of sequence: Splice site sequence
tgggtaagct

SEQ ID NO: 2839 - RNA, 10 nt, synthetic construct
  source 1..10: mol_type = other RNA
  misc_feature 1..10: note = Description of sequence: Splice site sequence
tgggtaaggg

SEQ ID NO: 2840 - RNA, 10 nt, synthetic construct
  source 1..10: mol_type = other RNA
  misc_feature 1..10: note = Description of sequence: Splice site sequence
tgggtaaggt

SEQ ID NO: 2841 - RNA, 10 nt, synthetic construct
  source 1..10: mol_type = other RNA
  misc_feature 1..10: note = Description of sequence: Splice site sequence
tgggtaagta

SEQ ID NO: 2842 - RNA, 10 nt, synthetic construct
  source 1..10: mol_type = other RNA
  misc_feature 1..10: note = Description of sequence: Splice site sequence
tgggtaagtc

SEQ ID NO: 2843 - RNA, 10 nt, synthetic construct
  source 1..10: mol_type = other RNA
  misc_feature 1..10: note = Description of sequence: Splice site sequence
tgggtaagtg

SEQ ID NO: 2844 - RNA, 10 nt, synthetic construct
  source 1..10: mol_type = other RNA
  misc_feature 1..10: note = Description of sequence: Splice site sequence
tgggtaagtt

SEQ ID NO: 2845 - RNA, 10 nt, synthetic construct
  source 1..10: mol_type = other RNA
  misc_feature 1..10: note = Description of sequence: Splice site sequence
tgggtaatgt

SEQ ID NO: 2846 - RNA, 10 nt, synthetic construct
  source 1..10: mol_type = other RNA
  misc_feature 1..10: note = Description of sequence: Splice site sequence
tgggtaatta

SEQ ID NO: 2847 - RNA, 10 nt, synthetic construct
  source 1..10: mol_type = other RNA
  misc_feature 1..10: note = Description of sequence: Splice site sequence
tgggtaattt

SEQ ID NO: 2848 - RNA, 10 nt, synthetic construct
  source 1..10: mol_type = other RNA
  misc_feature 1..10: note = Description of sequence: Splice site sequence
tgggtacaaa

SEQ ID NO: 2849 - RNA, 10 nt, synthetic construct
  source 1..10: mol_type = other RNA
  misc_feature 1..10: note = Description of sequence: Splice site sequence
tgggtacagt

SEQ ID NO: 2850 - RNA, 10 nt, synthetic construct
  source 1..10: mol_type = other RNA
  misc_feature 1..10: note = Description of sequence: Splice site sequence
tgggtactac

SEQ ID NO: 2851 - RNA, 10 nt, synthetic construct
  source 1..10: mol_type = other RNA
  misc_feature 1..10: note = Description of sequence: Splice site sequence
tgggtaggga

SEQ ID NO: 2852 - RNA, 10 nt, synthetic construct
  source 1..10: mol_type = other RNA
  misc_feature 1..10: note = Description of sequence: Splice site sequence
tgggtaggtc

SEQ ID NO: 2853 - RNA, 10 nt, synthetic construct
  source 1..10: mol_type = other RNA
  misc_feature 1..10: note = Description of sequence: Splice site sequence
tgggtaggtg

SEQ ID NO: 2854 - RNA, 10 nt, synthetic construct
  source 1..10: mol_type = other RNA
  misc_feature 1..10: note = Description of sequence: Splice site sequence
tgggtaggtt

SEQ ID NO: 2855 - RNA, 10 nt, synthetic construct
  source 1..10: mol_type = other RNA
  misc_feature 1..10: note = Description of sequence: Splice site sequence
tgggtagtta

SEQ ID NO: 2856 - RNA, 10 nt, synthetic construct
  source 1..10: mol_type = other RNA
  misc_feature 1..10: note = Description of sequence: Splice site sequence
tgggtatagt

SEQ ID NO: 2857 - RNA, 10 nt, synthetic construct
  source 1..10: mol_type = other RNA
  misc_feature 1..10: note = Description of sequence: Splice site sequence
tgggtatgaa

SEQ ID NO: 2858 - RNA, 10 nt, synthetic construct
  source 1..10: mol_type = other RNA
  misc_feature 1..10: note = Description of sequence: Splice site sequence
tgggtatgac

SEQ ID NO: 2859 - RNA, 10 nt, synthetic construct
  source 1..10: mol_type = other RNA
  misc_feature 1..10: note = Description of sequence: Splice site sequence
tgggtatgag

SEQ ID NO: 2860 - RNA, 10 nt, synthetic construct
  source 1..10: mol_type = other RNA
  misc_feature 1..10: note = Description of sequence: Splice site sequence
tgggtatgta

SEQ ID NO: 2861 - RNA, 10 nt, synthetic construct
  source 1..10: mol_type = other RNA
  misc_feature 1..10: note = Description of sequence: Splice site sequence
tgggtatgtc

SEQ ID NO: 2862 - RNA, 10 nt, synthetic construct
  source 1..10: mol_type = other RNA
  misc_feature 1..10: note = Description of sequence: Splice site sequence
tgggtatgtg

SEQ ID NO: 2863 - RNA, 10 nt, synthetic construct
  source 1..10: mol_type = other RNA
  misc_feature 1..10: note = Description of sequence: Splice site sequence
tgggtatgtt

SEQ ID NO: 2864 - RNA, 10 nt, synthetic construct
  source 1..10: mol_type = other RNA
  misc_feature 1..10: note = Description of sequence: Splice site sequence
tgggtatttg

SEQ ID NO: 2865 - RNA, 10 nt, synthetic construct
  source 1..10: mol_type = other RNA
  misc_feature 1..10: note = Description of sequence: Splice site sequence
tgggtctttg

SEQ ID NO: 2866 - RNA, 10 nt, synthetic construct
  source 1..10: mol_type = other RNA
  misc_feature 1..10: note = Description of sequence: Splice site sequence
tgggtgacct

SEQ ID NO: 2867 - RNA, 10 nt, synthetic construct
  source 1..10: mol_type = other RNA
  misc_feature 1..10: note = Description of sequence: Splice site sequence
tgggtgacta

SEQ ID NO: 2868 - RNA, 10 nt, synthetic construct
  source 1..10: mol_type = other RNA
  misc_feature 1..10: note = Description of sequence: Splice site sequence
tgggtgagac

SEQ ID NO: 2869 - RNA, 10 nt, synthetic construct
  source 1..10: mol_type = other RNA
  misc_feature 1..10: note = Description of sequence: Splice site sequence
tgggtgagag

SEQ ID NO: 2870 - RNA, 10 nt, synthetic construct
  source 1..10: mol_type = other RNA
  misc_feature 1..10: note = Description of sequence: Splice site sequence
tgggtgagca

SEQ ID NO: 2871 - RNA, 10 nt, synthetic construct
  source 1..10: mol_type = other RNA
  misc_feature 1..10: note = Description of sequence: Splice site sequence
tgggtgagcc

SEQ ID NO: 2872 - RNA, 10 nt, synthetic construct
  source 1..10: mol_type = other RNA
  misc_feature 1..10: note = Description of sequence: Splice site sequence
tgggtgagga

SEQ ID NO: 2873 - RNA, 10 nt, synthetic construct
  source 1..10: mol_type = other RNA
  misc_feature 1..10: note = Description of sequence: Splice site sequence
tgggtgaggc

SEQ ID NO: 2874 - RNA, 10 nt, synthetic construct
  source 1..10: mol_type = other RNA
  misc_feature 1..10: note = Description of sequence: Splice site sequence
tgggtgaggg

SEQ ID NO: 2875 - RNA, 10 nt, synthetic construct
  source 1..10: mol_type = other RNA
  misc_feature 1..10: note = Description of sequence: Splice site sequence
tgggtgagta

SEQ ID NO: 2876 - RNA, 10 nt, synthetic construct
  source 1..10: mol_type = other RNA
  misc_feature 1..10: note = Description of sequence: Splice site sequence
tgggtgagtc

SEQ ID NO: 2877 - RNA, 10 nt, synthetic construct
  source 1..10: mol_type = other RNA
  misc_feature 1..10: note = Description of sequence: Splice site sequence
tgggtgagtg

SEQ ID NO: 2878 - RNA, 10 nt, synthetic construct
  source 1..10: mol_type = other RNA
  misc_feature 1..10: note = Description of sequence: Splice site sequence
tgggtgagtt

SEQ ID NO: 2879 - RNA, 10 nt, synthetic construct
  source 1..10: mol_type = other RNA
  misc_feature 1..10: note = Description of sequence: Splice site sequence
tgggtgcgtg

SEQ ID NO: 2880 - RNA, 10 nt, synthetic construct
  source 1..10: mol_type = other RNA
  misc_feature 1..10: note = Description of sequence: Splice site sequence
tgggtggagg

SEQ ID NO: 2881 - RNA, 10 nt, synthetic construct
  source 1..10: mol_type = other RNA
  misc_feature 1..10: note = Description of sequence: Splice site sequence
tgggtggctt

SEQ ID NO: 2882 - RNA, 10 nt, synthetic construct
  source 1..10: mol_type = other RNA
  misc_feature 1..10: note = Description of sequence: Splice site sequence
tgggtggggg

SEQ ID NO: 2883 - RNA, 10 nt, synthetic construct
  source 1..10: mol_type = other RNA
  misc_feature 1..10: note = Description of sequence: Splice site sequence
tgggtgggta

SEQ ID NO: 2884 - RNA, 10 nt, synthetic construct
  source 1..10: mol_type = other RNA
  misc_feature 1..10: note = Description of sequence: Splice site sequence
tgggtgggtc

SEQ ID NO: 2885 - RNA, 10 nt, synthetic construct
  source 1..10: mol_type = other RNA
  misc_feature 1..10: note = Description of sequence: Splice site sequence
tgggtgggtg

SEQ ID NO: 2886 - RNA, 10 nt, synthetic construct
  source 1..10: mol_type = other RNA
  misc_feature 1..10: note = Description of sequence: Splice site sequence
tgggtgggtt

SEQ ID NO: 2887 - RNA, 10 nt, synthetic construct
  source 1..10: mol_type = other RNA
  misc_feature 1..10: note = Description of sequence: Splice site sequence
tgggtgtgga

SEQ ID NO: 2888 - RNA, 10 nt, synthetic construct
  source 1..10: mol_type = other RNA
  misc_feature 1..10: note = Description of sequence: Splice site sequence
tgggtgtgtc

SEQ ID NO: 2889 - RNA, 10 nt, synthetic construct
  source 1..10: mol_type = other RNA
  misc_feature 1..10: note = Description of sequence: Splice site sequence
tgggtgtgtg

SEQ ID NO: 2890 - RNA, 10 nt, synthetic construct
  source 1..10: mol_type = other RNA
  misc_feature 1..10: note = Description of sequence: Splice site sequence
tgggtgtgtt

SEQ ID NO: 2891 - RNA, 10 nt, synthetic construct
  source 1..10: mol_type = other RNA
  misc_feature 1..10: note = Description of sequence: Splice site sequence
tgggtgttta

SEQ ID NO: 2892 - RNA, 10 nt, synthetic construct
  source 1..10: mol_type = other RNA
  misc_feature 1..10: note = Description of sequence: Splice site sequence
tgggttaatg

SEQ ID NO: 2893 - RNA, 10 nt, synthetic construct
  source 1..10: mol_type = other RNA
  misc_feature 1..10: note = Description of sequence: Splice site sequence
tgggttagtc

SEQ ID NO: 2894 - RNA, 10 nt, synthetic construct
  source 1..10: mol_type = other RNA
  misc_feature 1..10: note = Description of sequence: Splice site sequence
tgggttagtg

SEQ ID NO: 2895 - RNA, 10 nt, synthetic construct
  source 1..10: mol_type = other RNA
  misc_feature 1..10: note = Description of sequence: Splice site sequence
tgggttagtt

SEQ ID NO: 2896 - RNA, 10 nt, synthetic construct
  source 1..10: mol_type = other RNA
  misc_feature 1..10: note = Description of sequence: Splice site sequence
tgggttcaag

SEQ ID NO: 2897 - RNA, 10 nt, synthetic construct
  source 1..10: mol_type = other RNA
  misc_feature 1..10: note = Description of sequence: Splice site sequence
tgggttcgta

SEQ ID NO: 2898 - RNA, 10 nt, synthetic construct
  source 1..10: mol_type = other RNA
  misc_feature 1..10: note = Description of sequence: Splice site sequence
tgggttggtg

SEQ ID NO: 2899 - RNA, 10 nt, synthetic construct
  source 1..10: mol_type = other RNA
  misc_feature 1..10: note = Description of sequence: Splice site sequence
tgggtttaag

SEQ ID NO: 2900 - RNA, 10 nt, synthetic construct
  source 1..10: mol_type = other RNA
  misc_feature 1..10: note = Description of sequence: Splice site sequence
tgggtttgta

SEQ ID NO: 2901 - RNA, 10 nt, synthetic construct
  source 1..10: mol_type = other RNA
  misc_feature 1..10: note = Description of sequence: Splice site sequence
tgtgcaagta

SEQ ID NO: 2902 - RNA, 10 nt, synthetic construct
  source 1..10: mol_type = other RNA
  misc_feature 1..10: note = Description of sequence: Splice site sequence
tgtgtaaata

SEQ ID NO: 2903 - RNA, 10 nt, synthetic construct
  source 1..10: mol_type = other RNA
  misc_feature 1..10: note = Description of sequence: Splice site sequence
tgtgtaagaa

SEQ ID NO: 2904 - RNA, 10 nt, synthetic construct
  source 1..10: mol_type = other RNA
  misc_feature 1..10: note = Description of sequence: Splice site sequence
tgtgtaagac

SEQ ID NO: 2905 - RNA, 10 nt, synthetic construct
  source 1..10: mol_type = other RNA
  misc_feature 1..10: note = Description of sequence: Splice site sequence
tgtgtaagag

SEQ ID NO: 2906 - RNA, 10 nt, synthetic construct
  source 1..10: mol_type = other RNA
  misc_feature 1..10: note = Description of sequence: Splice site sequence
tgtgtaaggt

SEQ ID NO: 2907 - RNA, 10 nt, synthetic construct
  source 1..10: mol_type = other RNA
  misc_feature 1..10: note = Description of sequence: Splice site sequence
tgtgtaagta

SEQ ID NO: 2908 - RNA, 10 nt, synthetic construct
  source 1..10: mol_type = other RNA
  misc_feature 1..10: note = Description of sequence: Splice site sequence
tgtgtaagtc

SEQ ID NO: 2909 - RNA, 10 nt, synthetic construct
  source 1..10: mol_type = other RNA
  misc_feature 1..10: note = Description of sequence: Splice site sequence
tgtgtaagtt

SEQ ID NO: 2910 - RNA, 10 nt, synthetic construct
  source 1..10: mol_type = other RNA
  misc_feature 1..10: note = Description of sequence: Splice site sequence
tgtgtacttc

SEQ ID NO: 2911 - RNA, 10 nt, synthetic construct
  source 1..10: mol_type = other RNA
  misc_feature 1..10: note = Description of sequence: Splice site sequence
tgtgtaggcg

SEQ ID NO: 2912 - RNA, 10 nt, synthetic construct
  source 1..10: mol_type = other RNA
  misc_feature 1..10: note = Description of sequence: Splice site sequence
tgtgtaggta

SEQ ID NO: 2913 - RNA, 10 nt, synthetic construct
  source 1..10: mol_type = other RNA
  misc_feature 1..10: note = Description of sequence: Splice site sequence
tgtgtagtta

SEQ ID NO: 2914 - RNA, 10 nt, synthetic construct
  source 1..10: mol_type = other RNA
  misc_feature 1..10: note = Description of sequence: Splice site sequence
tgtgtatgtg

SEQ ID NO: 2915 - RNA, 10 nt, synthetic construct
  source 1..10: mol_type = other RNA
  misc_feature 1..10: note = Description of sequence: Splice site sequence
tgtgtcagta

SEQ ID NO: 2916 - RNA, 10 nt, synthetic construct
  source 1..10: mol_type = other RNA
  misc_feature 1..10: note = Description of sequence: Splice site sequence
tgtgtctgta

SEQ ID NO: 2917 - RNA, 10 nt, synthetic construct
  source 1..10: mol_type = other RNA
  misc_feature 1..10: note = Description of sequence: Splice site sequence
tgtgtctgtc

SEQ ID NO: 2918 - RNA, 10 nt, synthetic construct
  source 1..10: mol_type = other RNA
  misc_feature 1..10: note = Description of sequence: Splice site sequence
tgtgtgaccc

SEQ ID NO: 2919 - RNA, 10 nt, synthetic construct
  source 1..10: mol_type = other RNA
  misc_feature 1..10: note = Description of sequence: Splice site sequence
tgtgtgagat

SEQ ID NO: 2920 - RNA, 10 nt, synthetic construct
  source 1..10: mol_type = other RNA
  misc_feature 1..10: note = Description of sequence: Splice site sequence
tgtgtgagca

SEQ ID NO: 2921 - RNA, 10 nt, synthetic construct
  source 1..10: mol_type = other RNA
  misc_feature 1..10: note = Description of sequence: Splice site sequence
tgtgtgagcc

SEQ ID NO: 2922 - RNA, 10 nt, synthetic construct
  source 1..10: mol_type = other RNA
  misc_feature 1..10: note = Description of sequence: Splice site sequence
tgtgtgagta

SEQ ID NO: 2923 - RNA, 10 nt, synthetic construct
  source 1..10: mol_type = other RNA
  misc_feature 1..10: note = Description of sequence: Splice site sequence
tgtgtgagtc

SEQ ID NO: 2924 - RNA, 10 nt, synthetic construct
  source 1..10: mol_type = other RNA
  misc_feature 1..10: note = Description of sequence: Splice site sequence
tgtgtgagtg

SEQ ID NO: 2925 - RNA, 10 nt, synthetic construct
  source 1..10: mol_type = other RNA
  misc_feature 1..10: note = Description of sequence: Splice site sequence
tgtgtgcgtg

SEQ ID NO: 2926 - RNA, 10 nt, synthetic construct
  source 1..10: mol_type = other RNA
  misc_feature 1..10: note = Description of sequence: Splice site sequence
tgtgtgggtg

SEQ ID NO: 2927 - RNA, 10 nt, synthetic construct
  source 1..10: mol_type = other RNA
  misc_feature 1..10: note = Description of sequence: Splice site sequence
tgtgtgggtt

SEQ ID NO: 2928 - RNA, 10 nt, synthetic construct
  source 1..10: mol_type = other RNA
  misc_feature 1..10: note = Description of sequence: Splice site sequence
tgtgtgtgag

SEQ ID NO: 2929 - RNA, 10 nt, synthetic construct
  source 1..10: mol_type = other RNA
  misc_feature 1..10: note = Description of sequence: Splice site sequence
tgtgtgttct

SEQ ID NO: 2930 - RNA, 10 nt, synthetic construct
  source 1..10: mol_type = other RNA
  misc_feature 1..10: note = Description of sequence: Splice site sequence
tgtgtttaga

SEQ ID NO: 2931 - RNA, 10 nt, synthetic construct
  source 1..10: mol_type = other RNA
  misc_feature 1..10: note = Description of sequence: Splice site sequence
ttagtaaata

SEQ ID NO: 2932 - RNA, 10 nt, synthetic construct
  source 1..10: mol_type = other RNA
  misc_feature 1..10: note = Description of sequence: Splice site sequence
ttagtaagaa

SEQ ID NO: 2933 - RNA, 10 nt, synthetic construct
  source 1..10: mol_type = other RNA
  misc_feature 1..10: note = Description of sequence: Splice site sequence
ttagtaagta

SEQ ID NO: 2934 - RNA, 10 nt, synthetic construct
  source 1..10: mol_type = other RNA
  misc_feature 1..10: note = Description of sequence: Splice site sequence
ttagtaagtg

SEQ ID NO: 2935 - RNA, 10 nt, synthetic construct
  source 1..10: mol_type = other RNA
  misc_feature 1..10: note = Description of sequence: Splice site sequence
ttagtaagtt

SEQ ID NO: 2936 - RNA, 10 nt, synthetic construct
  source 1..10: mol_type = other RNA
  misc_feature 1..10: note = Description of sequence: Splice site sequence
ttagtaggtg

SEQ ID NO: 2937 - RNA, 10 nt, synthetic construct
  source 1..10: mol_type = other RNA
  misc_feature 1..10: note = Description of sequence: Splice site sequence
ttagtgagca

SEQ ID NO: 2938 - RNA, 10 nt, synthetic construct
  source 1..10: mol_type = other RNA
  misc_feature 1..10: note = Description of sequence: Splice site sequence
ttagtgagtt

SEQ ID NO: 2939 - RNA, 10 nt, synthetic construct
  source 1..10: mol_type = other RNA
  misc_feature 1..10: note = Description of sequence: Splice site sequence
ttagttaagt

SEQ ID NO: 2940 - RNA, 10 nt, synthetic construct
  source 1..10: mol_type = other RNA
  misc_feature 1..10: note = Description of sequence: Splice site sequence
ttcgtaagtc

SEQ ID NO: 2941 - RNA, 10 nt, synthetic construct
  source 1..10: mol_type = other RNA
  misc_feature 1..10: note = Description of sequence: Splice site sequence
ttcgtaagtt

SEQ ID NO: 2942 - RNA, 10 nt, synthetic construct
  source 1..10: mol_type = other RNA
  misc_feature 1..10: note = Description of sequence: Splice site sequence
ttcgtaatta

SEQ ID NO: 2943 - RNA, 10 nt, synthetic construct
  source 1..10: mol_type = other RNA
  misc_feature 1..10: note = Description of sequence: Splice site sequence
ttcgtgagta

SEQ ID NO: 2944 - RNA, 10 nt, synthetic construct
  source 1..10: mol_type = other RNA
  misc_feature 1..10: note = Description of sequence: Splice site sequence
ttcgtgagtt

SEQ ID NO: 2945 - RNA, 10 nt, synthetic construct
  source 1..10: mol_type = other RNA
  misc_feature 1..10: note = Description of sequence: Splice site sequence
ttggcaagtg

SEQ ID NO: 2946 - RNA, 10 nt, synthetic construct
  source 1..10: mol_type = other RNA
  misc_feature 1..10: note = Description of sequence: Splice site sequence
ttggccgagt

SEQ ID NO: 2947 - RNA, 10 nt, synthetic construct
  source 1..10: mol_type = other RNA
  misc_feature 1..10: note = Description of sequence: Splice site sequence
ttggtaaaaa

SEQ ID NO: 2948 - RNA, 10 nt, synthetic construct
  source 1..10: mol_type = other RNA
  misc_feature 1..10: note = Description of sequence: Splice site sequence
ttggtaaaat

SEQ ID NO: 2949 - RNA, 10 nt, synthetic construct
  source 1..10: mol_type = other RNA
  misc_feature 1..10: note = Description of sequence: Splice site sequence
ttggtaaaga

SEQ ID NO: 2950 - RNA, 10 nt, synthetic construct
  source 1..10: mol_type = other RNA
  misc_feature 1..10: note = Description of sequence: Splice site sequence
ttggtaaagg

SEQ ID NO: 2951 - RNA, 10 nt, synthetic construct
  source 1..10: mol_type = other RNA
  misc_feature 1..10: note = Description of sequence: Splice site sequence
ttggtaaagt

SEQ ID NO: 2952 - RNA, 10 nt, synthetic construct
  source 1..10: mol_type = other RNA
  misc_feature 1..10: note = Description of sequence: Splice site sequence
ttggtaaatc

SEQ ID NO: 2953 - RNA, 10 nt, synthetic construct
  source 1..10: mol_type = other RNA
  misc_feature 1..10: note = Description of sequence: Splice site sequence
ttggtaaatg

SEQ ID NO: 2954 - RNA, 10 nt, synthetic construct
  source 1..10: mol_type = other RNA
  misc_feature 1..10: note = Description of sequence: Splice site sequence
ttggtaaatt

SEQ ID NO: 2955 - RNA, 10 nt, synthetic construct
  source 1..10: mol_type = other RNA
  misc_feature 1..10: note = Description of sequence: Splice site sequence
ttggtaactg

SEQ ID NO: 2956 - RNA, 10 nt, synthetic construct
  source 1..10: mol_type = other RNA
  misc_feature 1..10: note = Description of sequence: Splice site sequence
ttggtaactt

SEQ ID NO: 2957 - RNA, 10 nt, synthetic construct
  source 1..10: mol_type = other RNA
  misc_feature 1..10: note = Description of sequence: Splice site sequence
ttggtaagaa

SEQ ID NO: 2958 - RNA, 10 nt, synthetic construct
  source 1..10: mol_type = other RNA
  misc_feature 1..10: note = Description of sequence: Splice site sequence
ttggtaagag

SEQ ID NO: 2959 - RNA, 10 nt, synthetic construct
  source 1..10: mol_type = other RNA
  misc_feature 1..10: note = Description of sequence: Splice site sequence
ttggtaagct

SEQ ID NO: 2960 - RNA, 10 nt, synthetic construct
  source 1..10: mol_type = other RNA
  misc_feature 1..10: note = Description of sequence: Splice site sequence
ttggtaagga

SEQ ID NO: 2961 - RNA, 10 nt, synthetic construct
  source 1..10: mol_type = other RNA
  misc_feature 1..10: note = Description of sequence: Splice site sequence
ttggtaaggg

SEQ ID NO: 2962 - RNA, 10 nt, synthetic construct
  source 1..10: mol_type = other RNA
  misc_feature 1..10: note = Description of sequence: Splice site sequence
ttggtaagta

SEQ ID NO: 2963 - RNA, 10 nt, synthetic construct
  source 1..10: mol_type = other RNA
  misc_feature 1..10: note = Description of sequence: Splice site sequence
ttggtaagtg

SEQ ID NO: 2964 - RNA, 10 nt, synthetic construct
  source 1..10: mol_type = other RNA
  misc_feature 1..10: note = Description of sequence: Splice site sequence
ttggtaagtt

SEQ ID NO: 2965 - RNA, 10 nt, synthetic construct
  source 1..10: mol_type = other RNA
  misc_feature 1..10: note = Description of sequence: Splice site sequence
ttggtaatac

SEQ ID NO: 2966 - RNA, 10 nt, synthetic construct
  source 1..10: mol_type = other RNA
  misc_feature 1..10: note = Description of sequence: Splice site sequence
ttggtaatca

SEQ ID NO: 2967 - RNA, 10 nt, synthetic construct
  source 1..10: mol_type = other RNA
  misc_feature 1..10: note = Description of sequence: Splice site sequence
ttggtaatgc

SEQ ID NO: 2968 - RNA, 10 nt, synthetic construct
  source 1..10: mol_type = other RNA
  misc_feature 1..10: note = Description of sequence: Splice site sequence
ttggtaatgt

SEQ ID NO: 2969 - RNA, 10 nt, synthetic construct
  source 1..10: mol_type = other RNA
  misc_feature 1..10: note = Description of sequence: Splice site sequence
ttggtaattg

SEQ ID NO: 2970 - RNA, 10 nt, synthetic construct
  source 1..10: mol_type = other RNA
  misc_feature 1..10: note = Description of sequence: Splice site sequence
ttggtaattt

SEQ ID NO: 2971 - RNA, 10 nt, synthetic construct
  source 1..10: mol_type = other RNA
  misc_feature 1..10: note = Description of sequence: Splice site sequence
ttggtacata

SEQ ID NO: 2972 - RNA, 10 nt, synthetic construct
  source 1..10: mol_type = other RNA
  misc_feature 1..10: note = Description of sequence: Splice site sequence
ttggtacgtg

SEQ ID NO: 2973 - RNA, 10 nt, synthetic construct
  source 1..10: mol_type = other RNA
  misc_feature 1..10: note = Description of sequence: Splice site sequence
ttggtagagg

SEQ ID NO: 2974 - RNA, 10 nt, synthetic construct
  source 1..10: mol_type = other RNA
  misc_feature 1..10: note = Description of sequence: Splice site sequence
ttggtaggac

SEQ ID NO: 2975 - RNA, 10 nt, synthetic construct
  source 1..10: mol_type = other RNA
  misc_feature 1..10: note = Description of sequence: Splice site sequence
ttggtaggcg

SEQ ID NO: 2976 - RNA, 10 nt, synthetic construct
  source 1..10: mol_type = other RNA
  misc_feature 1..10: note = Description of sequence: Splice site sequence
ttggtaggct

SEQ ID NO: 2977 - RNA, 10 nt, synthetic construct
  source 1..10: mol_type = other RNA
  misc_feature 1..10: note = Description of sequence: Splice site sequence
ttggtaggga

SEQ ID NO: 2978 - RNA, 10 nt, synthetic construct
  source 1..10: mol_type = other RNA
  misc_feature 1..10: note = Description of sequence: Splice site sequence
ttggtaggta

SEQ ID NO: 2979 - RNA, 10 nt, synthetic construct
  source 1..10: mol_type = other RNA
  misc_feature 1..10: note = Description of sequence: Splice site sequence
ttggtaggtc

SEQ ID NO: 2980 - RNA, 10 nt, synthetic construct
  source 1..10: mol_type = other RNA
  misc_feature 1..10: note = Description of sequence: Splice site sequence
ttggtaggtg

SEQ ID NO: 2981 - RNA, 10 nt, synthetic construct
  source 1..10: mol_type = other RNA
  misc_feature 1..10: note = Description of sequence: Splice site sequence
ttggtataaa

SEQ ID NO: 2982 - RNA, 10 nt, synthetic construct
  source 1..10: mol_type = other RNA
  misc_feature 1..10: note = Description of sequence: Splice site sequence
ttggtataca

SEQ ID NO: 2983 - RNA, 10 nt, synthetic construct
  source 1..10: mol_type = other RNA
  misc_feature 1..10: note = Description of sequence: Splice site sequence
ttggtatatt

SEQ ID NO: 2984 - RNA, 10 nt, synthetic construct
  source 1..10: mol_type = other RNA
  misc_feature 1..10: note = Description of sequence: Splice site sequence
ttggtatcta

SEQ ID NO: 2985 - RNA, 10 nt, synthetic construct
  source 1..10: mol_type = other RNA
  misc_feature 1..10: note = Description of sequence: Splice site sequence
ttggtatctc

SEQ ID NO: 2986 - RNA, 10 nt, synthetic construct
  source 1..10: mol_type = other RNA
  misc_feature 1..10: note = Description of sequence: Splice site sequence
ttggtatgca

SEQ ID NO: 2987 - RNA, 10 nt, synthetic construct
  source 1..10: mol_type = other RNA
  misc_feature 1..10: note = Description of sequence: Splice site sequence
ttggtatgta

SEQ ID NO: 2988 - RNA, 10 nt, synthetic construct
  source 1..10: mol_type = other RNA
  misc_feature 1..10: note = Description of sequence: Splice site sequence
ttggtatgtg

SEQ ID NO: 2989 - RNA, 10 nt, synthetic construct
  source 1..10: mol_type = other RNA
  misc_feature 1..10: note = Description of sequence: Splice site sequence
ttggtatgtt

SEQ ID NO: 2990 - RNA, 10 nt, synthetic construct
  source 1..10: mol_type = other RNA
  misc_feature 1..10: note = Description of sequence: Splice site sequence
ttggtattgt

SEQ ID NO: 2991 - RNA, 10 nt, synthetic construct
  source 1..10: mol_type = other RNA
  misc_feature 1..10: note = Description of sequence: Splice site sequence
ttggtattta

SEQ ID NO: 2992 - RNA, 10 nt, synthetic construct
  source 1..10: mol_type = other RNA
  misc_feature 1..10: note = Description of sequence: Splice site sequence
ttggtatttt

SEQ ID NO: 2993 - RNA, 10 nt, synthetic construct
  source 1..10: mol_type = other RNA
  misc_feature 1..10: note = Description of sequence: Splice site sequence
ttggtcagaa

SEQ ID NO: 2994 - RNA, 10 nt, synthetic construct
  source 1..10: mol_type = other RNA
  misc_feature 1..10: note = Description of sequence: Splice site sequence
ttggtcagta

SEQ ID NO: 2995 - RNA, 10 nt, synthetic construct
  source 1..10: mol_type = other RNA
  misc_feature 1..10: note = Description of sequence: Splice site sequence
ttggtctctg

SEQ ID NO: 2996 - RNA, 10 nt, synthetic construct
  source 1..10: mol_type = other RNA
  misc_feature 1..10: note = Description of sequence: Splice site sequence
ttggtctgca

SEQ ID NO: 2997 - RNA, 10 nt, synthetic construct
  source 1..10: mol_type = other RNA
  misc_feature 1..10: note = Description of sequence: Splice site sequence
ttggtgaaaa

SEQ ID NO: 2998 - RNA, 10 nt, synthetic construct
  source 1..10: mol_type = other RNA
  misc_feature 1..10: note = Description of sequence: Splice site sequence
ttggtgactg

SEQ ID NO: 2999 - RNA, 10 nt, synthetic construct
  source 1..10: mol_type = other RNA
  misc_feature 1..10: note = Description of sequence: Splice site sequence
ttggtgagac

SEQ ID NO: 3000 - RNA, 10 nt, synthetic construct
  source 1..10: mol_type = other RNA
  misc_feature 1..10: note = Description of sequence: Splice site sequence
ttggtgagat

SEQ ID NO: 3001 - RNA, 10 nt, synthetic construct
  source 1..10: mol_type = other RNA
  misc_feature 1..10: note = Description of sequence: Splice site sequence
ttggtgagca

SEQ ID NO: 3002 - RNA, 10 nt, synthetic construct
  source 1..10: mol_type = other RNA
  misc_feature 1..10: note = Description of sequence: Splice site sequence
ttggtgagga

SEQ ID NO: 3003 - RNA, 10 nt, synthetic construct
  source 1..10: mol_type = other RNA
  misc_feature 1..10: note = Description of sequence: Splice site sequence
ttggtgaggg

SEQ ID NO: 3004 - RNA, 10 nt, synthetic construct
  source 1..10: mol_type = other RNA
  misc_feature 1..10: note = Description of sequence: Splice site sequence
ttggtgagta

SEQ ID NO: 3005 - RNA, 10 nt, synthetic construct
  source 1..10: mol_type = other RNA
  misc_feature 1..10: note = Description of sequence: Splice site sequence
ttggtgagtc

SEQ ID NO: 3006 - RNA, 10 nt, synthetic construct
  source 1..10: mol_type = other RNA
  misc_feature 1..10: note = Description of sequence: Splice site sequence
ttggtgagtg

SEQ ID NO: 3007 - RNA, 10 nt, synthetic construct
  source 1..10: mol_type = other RNA
  misc_feature 1..10: note = Description of sequence: Splice site sequence
ttggtgagtt

SEQ ID NO: 3008 - RNA, 10 nt, synthetic construct
  source 1..10: mol_type = other RNA
  misc_feature 1..10: note = Description of sequence: Splice site sequence
ttggtgatgg

SEQ ID NO: 3009 - RNA, 10 nt, synthetic construct
  source 1..10: mol_type = other RNA
  misc_feature 1..10: note = Description of sequence: Splice site sequence
ttggtgatta

SEQ ID NO: 3010 - RNA, 10 nt, synthetic construct
  source 1..10: mol_type = other RNA
  misc_feature 1..10: note = Description of sequence: Splice site sequence
ttggtgattg

SEQ ID NO: 3011 - RNA, 10 nt, synthetic construct
  source 1..10: mol_type = other RNA
  misc_feature 1..10: note = Description of sequence: Splice site sequence
ttggtgcaca

SEQ ID NO: 3012 - RNA, 10 nt, synthetic construct
  source 1..10: mol_type = other RNA
  misc_feature 1..10: note = Description of sequence: Splice site sequence
ttggtgggaa

SEQ ID NO: 3013 - RNA, 10 nt, synthetic construct
  source 1..10: mol_type = other RNA
  misc_feature 1..10: note = Description of sequence: Splice site sequence
ttggtggggc

SEQ ID NO: 3014 - RNA, 10 nt, synthetic construct
  source 1..10: mol_type = other RNA
  misc_feature 1..10: note = Description of sequence: Splice site sequence
ttggtgggta

SEQ ID NO: 3015 - RNA, 10 nt, synthetic construct
  source 1..10: mol_type = other RNA
  misc_feature 1..10: note = Description of sequence: Splice site sequence
ttggtgggtc

SEQ ID NO: 3016 - RNA, 10 nt, synthetic construct
  source 1..10: mol_type = other RNA
  misc_feature 1..10: note = Description of sequence: Splice site sequence
ttggtgggtg

SEQ ID NO: 3017 - RNA, 10 nt, synthetic construct
  source 1..10: mol_type = other RNA
  misc_feature 1..10: note = Description of sequence: Splice site sequence
ttggtgggtt

SEQ ID NO: 3018 - RNA, 10 nt, synthetic construct
  source 1..10: mol_type = other RNA
  misc_feature 1..10: note = Description of sequence: Splice site sequence
ttggtgtggt

SEQ ID NO: 3019 - RNA, 10 nt, synthetic construct
  source 1..10: mol_type = other RNA
  misc_feature 1..10: note = Description of sequence: Splice site sequence
ttggtgtgtc

SEQ ID NO: 3020 - RNA, 10 nt, synthetic construct
  source 1..10: mol_type = other RNA
  misc_feature 1..10: note = Description of sequence: Splice site sequence
ttggtgtgtg

SEQ ID NO: 3021 - RNA, 10 nt, synthetic construct
  source 1..10: mol_type = other RNA
  misc_feature 1..10: note = Description of sequence: Splice site sequence
ttggtgtgtt

SEQ ID NO: 3022 - RNA, 10 nt, synthetic construct
  source 1..10: mol_type = other RNA
  misc_feature 1..10: note = Description of sequence: Splice site sequence
ttggttaagt

SEQ ID NO: 3023 - RNA, 10 nt, synthetic construct
  source 1..10: mol_type = other RNA
  misc_feature 1..10: note = Description of sequence: Splice site sequence
ttggttagca

SEQ ID NO: 3024 - RNA, 10 nt, synthetic construct
  source 1..10: mol_type = other RNA
  misc_feature 1..10: note = Description of sequence: Splice site sequence
ttggttagtg

SEQ ID NO: 3025 - RNA, 10 nt, synthetic construct
  source 1..10: mol_type = other RNA
  misc_feature 1..10: note = Description of sequence: Splice site sequence
ttggttagtt

SEQ ID NO: 3026 - RNA, 10 nt, synthetic construct
  source 1..10: mol_type = other RNA
  misc_feature 1..10: note = Description of sequence: Splice site sequence
ttggttggga

SEQ ID NO: 3027 - RNA, 10 nt, synthetic construct
  source 1..10: mol_type = other RNA
  misc_feature 1..10: note = Description of sequence: Splice site sequence
ttggttggtt

SEQ ID NO: 3028 - RNA, 10 nt, synthetic construct
  source 1..10: mol_type = other RNA
  misc_feature 1..10: note = Description of sequence: Splice site sequence
ttggtttgta

SEQ ID NO: 3029 - RNA, 10 nt, synthetic construct
  source 1..10: mol_type = other RNA
  misc_feature 1..10: note = Description of sequence: Splice site sequence
ttggtttgtc

SEQ ID NO: 3030 - RNA, 10 nt, synthetic construct
  source 1..10: mol_type = other RNA
  misc_feature 1..10: note = Description of sequence: Splice site sequence
tttgcaagtg

SEQ ID NO: 3031 - RNA, 10 nt, synthetic construct
  source 1..10: mol_type = other RNA
  misc_feature 1..10: note = Description of sequence: Splice site sequence
tttgtaaata

SEQ ID NO: 3032 - RNA, 10 nt, synthetic construct
  source 1..10: mol_type = other RNA
  misc_feature 1..10: note = Description of sequence: Splice site sequence
tttgtaaatg

SEQ ID NO: 3033 - RNA, 10 nt, synthetic construct
  source 1..10: mol_type = other RNA
  misc_feature 1..10: note = Description of sequence: Splice site sequence
tttgtaagaa

SEQ ID NO: 3034 - RNA, 10 nt, synthetic construct
  source 1..10: mol_type = other RNA
  misc_feature 1..10: note = Description of sequence: Splice site sequence
tttgtaagac

SEQ ID NO: 3035 - RNA, 10 nt, synthetic construct
  source 1..10: mol_type = other RNA
  misc_feature 1..10: note = Description of sequence: Splice site sequence
tttgtaagag

SEQ ID NO: 3036 - RNA, 10 nt, synthetic construct
  source 1..10: mol_type = other RNA
  misc_feature 1..10: note = Description of sequence: Splice site sequence
tttgtaagca

SEQ ID NO: 3037 - RNA, 10 nt, synthetic construct
  source 1..10: mol_type = other RNA
  misc_feature 1..10: note = Description of sequence: Splice site sequence
tttgtaaggt

SEQ ID NO: 3038 - RNA, 10 nt, synthetic construct
  source 1..10: mol_type = other RNA
  misc_feature 1..10: note = Description of sequence: Splice site sequence
tttgtaagta

SEQ ID NO: 3039 - RNA, 10 nt, synthetic construct
  source 1..10: mol_type = other RNA
  misc_feature 1..10: note = Description of sequence: Splice site sequence
tttgtaagtc

SEQ ID NO: 3040 - RNA, 10 nt, synthetic construct
  source 1..10: mol_type = other RNA
  misc_feature 1..10: note = Description of sequence: Splice site sequence
tttgtaagtg

SEQ ID NO: 3041 - RNA, 10 nt, synthetic construct
  source 1..10: mol_type = other RNA
  misc_feature 1..10: note = Description of sequence: Splice site sequence
tttgtaagtt

SEQ ID NO: 3042 - RNA, 10 nt, synthetic construct
  source 1..10: mol_type = other RNA
  misc_feature 1..10: note = Description of sequence: Splice site sequence
tttgtaattt

SEQ ID NO: 3043 - RNA, 10 nt, synthetic construct
  source 1..10: mol_type = other RNA
  misc_feature 1..10: note = Description of sequence: Splice site sequence
tttgtacagg

SEQ ID NO: 3044 - RNA, 10 nt, synthetic construct
  source 1..10: mol_type = other RNA
  misc_feature 1..10: note = Description of sequence: Splice site sequence
tttgtacgtg

SEQ ID NO: 3045 - RNA, 10 nt, synthetic construct
  source 1..10: mol_type = other RNA
  misc_feature 1..10: note = Description of sequence: Splice site sequence
tttgtactag

SEQ ID NO: 3046 - RNA, 10 nt, synthetic construct
  source 1..10: mol_type = other RNA
  misc_feature 1..10: note = Description of sequence: Splice site sequence
tttgtactgt

SEQ ID NO: 3047 - RNA, 10 nt, synthetic construct
  source 1..10: mol_type = other RNA
  misc_feature 1..10: note = Description of sequence: Splice site sequence
tttgtaggtt

SEQ ID NO: 3048 - RNA, 10 nt, synthetic construct
  source 1..10: mol_type = other RNA
  misc_feature 1..10: note = Description of sequence: Splice site sequence
tttgtatcct

SEQ ID NO: 3049 - RNA, 10 nt, synthetic construct
  source 1..10: mol_type = other RNA
  misc_feature 1..10: note = Description of sequence: Splice site sequence
tttgtatgtt

SEQ ID NO: 3050 - RNA, 10 nt, synthetic construct
  source 1..10: mol_type = other RNA
  misc_feature 1..10: note = Description of sequence: Splice site sequence
tttgtgagca

SEQ ID NO: 3051 - RNA, 10 nt, synthetic construct
  source 1..10: mol_type = other RNA
  misc_feature 1..10: note = Description of sequence: Splice site sequence
tttgtgagtg

SEQ ID NO: 3052 - RNA, 10 nt, synthetic construct
  source 1..10: mol_type = other RNA
  misc_feature 1..10: note = Description of sequence: Splice site sequence
tttgtgcgtc

SEQ ID NO: 3053 - RNA, 10 nt, synthetic construct
  source 1..10: mol_type = other RNA
  misc_feature 1..10: note = Description of sequence: Splice site sequence
tttgtgtgtc

SEQ ID NO: 3054 - RNA, 10 nt, synthetic construct
  source 1..10: mol_type = other RNA
  misc_feature 1..10: note = Description of sequence: Splice site sequence
tgggtacctg

SEQ ID NO: 3055 - RNA, 10 nt, synthetic construct
  source 1..10: mol_type = other RNA
  misc_feature 1..10: note = Description of sequence: Splice site sequence
aaggttagag

SEQ ID NO: 3056 - RNA, 10 nt, synthetic construct
  source 1..10: mol_type = other RNA
  misc_feature 1..10: note = Description of sequence: Splice site sequence
atggcactta

SEQ ID NO: 3057 - RNA, 10 nt, synthetic construct
  source 1..10: mol_type = other RNA
  misc_feature 1..10: note = Description of sequence: Splice site sequence
tgggtgagct

SEQ ID NO: 3058 - RNA, 10 nt, synthetic construct
  source 1..10: mol_type = other RNA
  misc_feature 1..10: note = Description of sequence: Splice site sequence
cgagctgggc

SEQ ID NO: 3059 - RNA, 10 nt, synthetic construct
  source 1..10: mol_type = other RNA
  misc_feature 1..10: note = Description of sequence: Splice site sequence
aaagcacccc

SEQ ID NO: 3060 - RNA, 10 nt, synthetic construct
  source 1..10: mol_type = other RNA
  misc_feature 1..10: note = Description of sequence: Splice site sequence
taggtggggg

SEQ ID NO: 3061 - RNA, 10 nt, synthetic construct
  source 1..10: mol_type = other RNA
  misc_feature 1..10: note = Description of sequence: Splice site sequence
agagtaacgt

SEQ ID NO: 3062 - RNA, 10 nt, synthetic construct
  source 1..10: mol_type = other RNA
  misc_feature 1..10: note = Description of sequence: Splice site sequence
tcggtgatgt

SEQ ID NO: 3063 - RNA, 10 nt, synthetic construct
  source 1..10: mol_type = other RNA
  misc_feature 1..10: note = Description of sequence: Splice site sequence
agggtctgag

SEQ ID NO: 3064 - RNA, 10 nt, synthetic construct
  source 1..10: mol_type = other RNA
  misc_feature 1..10: note = Description of sequence: Splice site sequence
gaggtgactg

SEQ ID NO: 3065 - RNA, 10 nt, synthetic construct
  source 1..10: mol_type = other RNA
  misc_feature 1..10: note = Description of sequence: Splice site sequence
atggtaggtt

SEQ ID NO: 3066 - RNA, 10 nt, synthetic construct
  source 1..10: mol_type = other RNA
  misc_feature 1..10: note = Description of sequence: Splice site sequence
caagtactgc

SEQ ID NO: 3067 - RNA, 10 nt, synthetic construct
  source 1..10: mol_type = other RNA
  misc_feature 1..10: note = Description of sequence: Splice site sequence
cacgtgcgta

SEQ ID NO: 3068 - RNA, 10 nt, synthetic construct
  source 1..10: mol_type = other RNA
  misc_feature 1..10: note = Description of sequence: Splice site sequence
ccggtgagct

SEQ ID NO: 3069 - RNA, 10 nt, synthetic construct
  source 1..10: mol_type = other RNA
  misc_feature 1..10: note = Description of sequence: Splice site sequence
caggtacttc

SEQ ID NO: 3070 - RNA, 10 nt, synthetic construct
  source 1..10: mol_type = other RNA
  misc_feature 1..10: note = Description of sequence: Splice site sequence
gaagcaagta

SEQ ID NO: 3071 - RNA, 10 nt, synthetic construct
  source 1..10: mol_type = other RNA
  misc_feature 1..10: note = Description of sequence: Splice site sequence
caggcaagtc

SEQ ID NO: 3072 - RNA, 10 nt, synthetic construct
  source 1..10: mol_type = other RNA
  misc_feature 1..10: note = Description of sequence: Splice site sequence
ccagttgggt

SEQ ID NO: 3073 - RNA, 10 nt, synthetic construct
  source 1..10: mol_type = other RNA
  misc_feature 1..10: note = Description of sequence: Splice site sequence
aaggtgtggg

SEQ ID NO: 3074 - RNA, 10 nt, synthetic construct
  source 1..10: mol_type = other RNA
  misc_feature 1..10: note = Description of sequence: Splice site sequence
ccggtatgaa

SEQ ID NO: 3075 - RNA, 10 nt, synthetic construct
  source 1..10: mol_type = other RNA
  misc_feature 1..10: note = Description of sequence: Splice site sequence
agagtaatag

SEQ ID NO: 3076 - RNA, 10 nt, synthetic construct
  source 1..10: mol_type = other RNA
  misc_feature 1..10: note = Description of sequence: Splice site sequence
ctcgtatgcc

SEQ ID NO: 3077 - RNA, 10 nt, synthetic construct
  source 1..10: mol_type = other RNA
  misc_feature 1..10: note = Description of sequence: Splice site sequence
taggcaagtt

SEQ ID NO: 3078 - RNA, 10 nt, synthetic construct
  source 1..10: mol_type = other RNA
  misc_feature 1..10: note = Description of sequence: Splice site sequence
ggagttaagt

SEQ ID NO: 3079 - RNA, 10 nt, synthetic construct
  source 1..10: mol_type = other RNA
  misc_feature 1..10: note = Description of sequence: Splice site sequence
aaggttggct

SEQ ID NO: 3080 - RNA, 10 nt, synthetic construct
  source 1..10: mol_type = other RNA
  misc_feature 1..10: note = Description of sequence: Splice site sequence
tgagtatgtg

SEQ ID NO: 3081 - RNA, 10 nt, synthetic construct
  source 1..10: mol_type = other RNA
  misc_feature 1..10: note = Description of sequence: Splice site sequence
ccagccttcc

SEQ ID NO: 3082 - RNA, 10 nt, synthetic construct
  source 1..10: mol_type = other RNA
  misc_feature 1..10: note = Description of sequence: Splice site sequence
cctgtacgtg

SEQ ID NO: 3083 - RNA, 10 nt, synthetic construct
  source 1..10: mol_type = other RNA
  misc_feature 1..10: note = Description of sequence: Splice site sequence
caggtacgct

SEQ ID NO: 3084 - RNA, 10 nt, synthetic construct
  source 1..10: mol_type = other RNA
  misc_feature 1..10: note = Description of sequence: Splice site sequence
gaggttcttc

SEQ ID NO: 3085 - RNA, 10 nt, synthetic construct
  source 1..10: mol_type = other RNA
  misc_feature 1..10: note = Description of sequence: Splice site sequence
aaggttgcct

SEQ ID NO: 3086 - RNA, 10 nt, synthetic construct
  source 1..10: mol_type = other RNA
  misc_feature 1..10: note = Description of sequence: Splice site sequence
cgtgttcact

SEQ ID NO: 3087 - RNA, 10 nt, synthetic construct
  source 1..10: mol_type = other RNA
  misc_feature 1..10: note = Description of sequence: Splice site sequence
cgggtgggga

SEQ ID NO: 3088 - RNA, 10 nt, synthetic construct
  source 1..10: mol_type = other RNA
  misc_feature 1..10: note = Description of sequence: Splice site sequence
cgggtaagga

SEQ ID NO: 3089 - RNA, 10 nt, synthetic construct
  source 1..10: mol_type = other RNA
  misc_feature 1..10: note = Description of sequence: Splice site sequence
acggtagagc

SEQ ID NO: 3090 - RNA, 10 nt, synthetic construct
  source 1..10: mol_type = other RNA
  misc_feature 1..10: note = Description of sequence: Splice site sequence
gcggtaagag

SEQ ID NO: 3091 - RNA, 10 nt, synthetic construct
  source 1..10: mol_type = other RNA
  misc_feature 1..10: note = Description of sequence: Splice site sequence
caggtgttgt

SEQ ID NO: 3092 - RNA, 10 nt, synthetic construct
  source 1..10: mol_type = other RNA
  misc_feature 1..10: note = Description of sequence: Splice site sequence
gaagtttgtg

SEQ ID NO: 3093 - RNA, 10 nt, synthetic construct
  source 1..10: mol_type = other RNA
  misc_feature 1..10: note = Description of sequence: Splice site sequence
cgggttcgtg

SEQ ID NO: 3094 - RNA, 10 nt, synthetic construct
  source 1..10: mol_type = other RNA
  misc_feature 1..10: note = Description of sequence: Splice site sequence
attgtccggc

SEQ ID NO: 3095 - RNA, 10 nt, synthetic construct
  source 1..10: mol_type = other RNA
  misc_feature 1..10: note = Description of sequence: Splice site sequence
gatgtgtgtg

SEQ ID NO: 3096 - RNA, 10 nt, synthetic construct
  source 1..10: mol_type = other RNA
  misc_feature 1..10: note = Description of sequence: Splice site sequence
atggtctgtt

SEQ ID NO: 3097 - RNA, 10 nt, synthetic construct
  source 1..10: mol_type = other RNA
  misc_feature 1..10: note = Description of sequence: Splice site sequence
agtgtaagga

SEQ ID NO: 3098 - RNA, 10 nt, synthetic construct
  source 1..10: mol_type = other RNA
  misc_feature 1..10: note = Description of sequence: Splice site sequence
aaggtgaaga

SEQ ID NO: 3099 - RNA, 10 nt, synthetic construct
  source 1..10: mol_type = other RNA
  misc_feature 1..10: note = Description of sequence: Splice site sequence
taggtgagcg

SEQ ID NO: 3100 - RNA, 10 nt, synthetic construct
  source 1..10: mol_type = other RNA
  misc_feature 1..10: note = Description of sequence: Splice site sequence
gccgtaagtt

SEQ ID NO: 3101 - RNA, 10 nt, synthetic construct
  source 1..10: mol_type = other RNA
  misc_feature 1..10: note = Description of sequence: Splice site sequence
acagcccatg

SEQ ID NO: 3102 - RNA, 10 nt, synthetic construct
  source 1..10: mol_type = other RNA
  misc_feature 1..10: note = Description of sequence: Splice site sequence
gcggtgagcc

SEQ ID NO: 3103 - RNA, 10 nt, synthetic construct
  source 1..10: mol_type = other RNA
  misc_feature 1..10: note = Description of sequence: Splice site sequence
atggtaccta

SEQ ID NO: 3104 - RNA, 10 nt, synthetic construct
  source 1..10: mol_type = other RNA
  misc_feature 1..10: note = Description of sequence: Splice site sequence
atggtggtgc

SEQ ID NO: 3105 - RNA, 10 nt, synthetic construct
  source 1..10: mol_type = other RNA
  misc_feature 1..10: note = Description of sequence: Splice site sequence
taagtggcag

SEQ ID NO: 3106 - RNA, 10 nt, synthetic construct
  source 1..10: mol_type = other RNA
  misc_feature 1..10: note = Description of sequence: Splice site sequence
taggtatagt

SEQ ID NO: 3107 - RNA, 10 nt, synthetic construct
  source 1..10: mol_type = other RNA
  misc_feature 1..10: note = Description of sequence: Splice site sequence
ctggtattta

SEQ ID NO: 3108 - RNA, 10 nt, synthetic construct
  source 1..10: mol_type = other RNA
  misc_feature 1..10: note = Description of sequence: Splice site sequence
agggtaaacg

SEQ ID NO: 3109 - RNA, 10 nt, synthetic construct
  source 1..10: mol_type = other RNA
  misc_feature 1..10: note = Description of sequence: Splice site sequence
ttggtactga

SEQ ID NO: 3110 - RNA, 10 nt, synthetic construct
  source 1..10: mol_type = other RNA
  misc_feature 1..10: note = Description of sequence: Splice site sequence
gaggtggata

SEQ ID NO: 3111 - RNA, 10 nt, synthetic construct
  source 1..10: mol_type = other RNA
  misc_feature 1..10: note = Description of sequence: Splice site sequence
gatgtaagaa

SEQ ID NO: 3112 - RNA, 10 nt, synthetic construct
  source 1..10: mol_type = other RNA
  misc_feature 1..10: note = Description of sequence: Splice site sequence
acggtcagtt

SEQ ID NO: 3113 - RNA, 10 nt, synthetic construct
  source 1..10: mol_type = other RNA
  misc_feature 1..10: note = Description of sequence: Splice site sequence
taagtaaaca

SEQ ID NO: 3114 - RNA, 10 nt, synthetic construct
  source 1..10: mol_type = other RNA
  misc_feature 1..10: note = Description of sequence: Splice site sequence
agggtatttg

SEQ ID NO: 3115 - RNA, 10 nt, synthetic construct
  source 1..10: mol_type = other RNA
  misc_feature 1..10: note = Description of sequence: Splice site sequence
caggtgccac

SEQ ID NO: 3116 - RNA, 10 nt, synthetic construct
  source 1..10: mol_type = other RNA
  misc_feature 1..10: note = Description of sequence: Splice site sequence
aatgtacagg

SEQ ID NO: 3117 - RNA, 10 nt, synthetic construct
  source 1..10: mol_type = other RNA
  misc_feature 1..10: note = Description of sequence: Splice site sequence
agtgtaggtg

SEQ ID NO: 3118 - RNA, 10 nt, synthetic construct
  source 1..10: mol_type = other RNA
  misc_feature 1..10: note = Description of sequence: Splice site sequence
gaggtaactc

SEQ ID NO: 3119 - RNA, 10 nt, synthetic construct
  source 1..10: mol_type = other RNA
  misc_feature 1..10: note = Description of sequence: Splice site sequence
gaggtggcgc

SEQ ID NO: 3120 - RNA, 10 nt, synthetic construct
  source 1..10: mol_type = other RNA
  misc_feature 1..10: note = Description of sequence: Splice site sequence
ctggtaattg

SEQ ID NO: 3121 - RNA, 10 nt, synthetic construct
  source 1..10: mol_type = other RNA
  misc_feature 1..10: note = Description of sequence: Splice site sequence
gaggtttgct

SEQ ID NO: 3122 - RNA, 10 nt, synthetic construct
  source 1..10: mol_type = other RNA
  misc_feature 1..10: note = Description of sequence: Splice site sequence
tgtgtacgtg

SEQ ID NO: 3123 - RNA, 10 nt, synthetic construct
  source 1..10: mol_type = other RNA
  misc_feature 1..10: note = Description of sequence: Splice site sequence
ctagtaggca

SEQ ID NO: 3124 - RNA, 10 nt, synthetic construct
  source 1..10: mol_type = other RNA
  misc_feature 1..10: note = Description of sequence: Splice site sequence
tctgtaaggc

SEQ ID NO: 3125 - RNA, 10 nt, synthetic construct
  source 1..10: mol_type = other RNA
  misc_feature 1..10: note = Description of sequence: Splice site sequence
aaggtaacca

SEQ ID NO: 3126 - RNA, 10 nt, synthetic construct
  source 1..10: mol_type = other RNA
  misc_feature 1..10: note = Description of sequence: Splice site sequence
aacgtaggac

SEQ ID NO: 3127 - RNA, 10 nt, synthetic construct
  source 1..10: mol_type = other RNA
  misc_feature 1..10: note = Description of sequence: Splice site sequence
gtagcaggta

SEQ ID NO: 3128 - RNA, 10 nt, synthetic construct
  source 1..10: mol_type = other RNA
  misc_feature 1..10: note = Description of sequence: Splice site sequence
gaggtcagac

SEQ ID NO: 3129 - RNA, 10 nt, synthetic construct
  source 1..10: mol_type = other RNA
  misc_feature 1..10: note = Description of sequence: Splice site sequence
agggtatgaa

SEQ ID NO: 3130 - RNA, 10 nt, synthetic construct
  source 1..10: mol_type = other RNA
  misc_feature 1..10: note = Description of sequence: Splice site sequence
caggcacgtg

SEQ ID NO: 3131 - RNA, 10 nt, synthetic construct
  source 1..10: mol_type = other RNA
  misc_feature 1..10: note = Description of sequence: Splice site sequence
ggggcaagac

SEQ ID NO: 3132 - RNA, 10 nt, synthetic construct
  source 1..10: mol_type = other RNA
  misc_feature 1..10: note = Description of sequence: Splice site sequence
aaggcaaggt

SEQ ID NO: 3133 - RNA, 10 nt, synthetic construct
  source 1..10: mol_type = other RNA
  misc_feature 1..10: note = Description of sequence: Splice site sequence
ttggtgagaa

SEQ ID NO: 3134 - RNA, 10 nt, synthetic construct
  source 1..10: mol_type = other RNA
  misc_feature 1..10: note = Description of sequence: Splice site sequence
gacgtgagtc

SEQ ID NO: 3135 - RNA, 10 nt, synthetic construct
  source 1..10: mol_type = other RNA
  misc_feature 1..10: note = Description of sequence: Splice site sequence
tatgtatgct

SEQ ID NO: 3136 - RNA, 10 nt, synthetic construct
  source 1..10: mol_type = other RNA
  misc_feature 1..10: note = Description of sequence: Splice site sequence
caggtgaact

SEQ ID NO: 3137 - RNA, 10 nt, synthetic construct
  source 1..10: mol_type = other RNA
  misc_feature 1..10: note = Description of sequence: Splice site sequence
cacgtaaatg

SEQ ID NO: 3138 - RNA, 10 nt, synthetic construct
  source 1..10: mol_type = other RNA
  misc_feature 1..10: note = Description of sequence: Splice site sequence
aaggtgtgat

SEQ ID NO: 3139 - RNA, 10 nt, synthetic construct
  source 1..10: mol_type = other RNA
  misc_feature 1..10: note = Description of sequence: Splice site sequence
gaagtatttg

SEQ ID NO: 3140 - RNA, 10 nt, synthetic construct
  source 1..10: mol_type = other RNA
  misc_feature 1..10: note = Description of sequence: Splice site sequence
aaggtctgtg

SEQ ID NO: 3141 - RNA, 10 nt, synthetic construct
  source 1..10: mol_type = other RNA
  misc_feature 1..10: note = Description of sequence: Splice site sequence
aaggtggagg

SEQ ID NO: 3142 - RNA, 10 nt, synthetic construct
  source 1..10: mol_type = other RNA
  misc_feature 1..10: note = Description of sequence: Splice site sequence
aaagttctgt

SEQ ID NO: 3143 - RNA, 10 nt, synthetic construct
  source 1..10: mol_type = other RNA
  misc_feature 1..10: note = Description of sequence: Splice site sequence
attgtgagga

SEQ ID NO: 3144 - RNA, 10 nt, synthetic construct
  source 1..10: mol_type = other RNA
  misc_feature 1..10: note = Description of sequence: Splice site sequence
caggttggaa

SEQ ID NO: 3145 - RNA, 10 nt, synthetic construct
  source 1..10: mol_type = other RNA
  misc_feature 1..10: note = Description of sequence: Splice site sequence
ctggtcactt

SEQ ID NO: 3146 - RNA, 10 nt, synthetic construct
  source 1..10: mol_type = other RNA
  misc_feature 1..10: note = Description of sequence: Splice site sequence
agggtaggat

SEQ ID NO: 3147 - RNA, 10 nt, synthetic construct
  source 1..10: mol_type = other RNA
  misc_feature 1..10: note = Description of sequence: Splice site sequence
aatgtgtgtt

SEQ ID NO: 3148 - RNA, 10 nt, synthetic construct
  source 1..10: mol_type = other RNA
  misc_feature 1..10: note = Description of sequence: Splice site sequence
aaggcgggct

SEQ ID NO: 3149 - RNA, 10 nt, synthetic construct
  source 1..10: mol_type = other RNA
  misc_feature 1..10: note = Description of sequence: Splice site sequence
atagcaagta

SEQ ID NO: 3150 - RNA, 10 nt, synthetic construct
  source 1..10: mol_type = other RNA
  misc_feature 1..10: note = Description of sequence: Splice site sequence
caagcaaggc

SEQ ID NO: 3151 - RNA, 10 nt, synthetic construct
  source 1..10: mol_type = other RNA
  misc_feature 1..10: note = Description of sequence: Splice site sequence
gtggtaatta

SEQ ID NO: 3152 - RNA, 10 nt, synthetic construct
  source 1..10: mol_type = other RNA
  misc_feature 1..10: note = Description of sequence: Splice site sequence
tctgttcagt

SEQ ID NO: 3153 - RNA, 10 nt, synthetic construct
  source 1..10: mol_type = other RNA
  misc_feature 1..10: note = Description of sequence: Splice site sequence
aaggtatcat

SEQ ID NO: 3154 - RNA, 10 nt, synthetic construct
  source 1..10: mol_type = other RNA
  misc_feature 1..10: note = Description of sequence: Splice site sequence
taagttggca

SEQ ID NO: 3155 - RNA, 10 nt, synthetic construct
  source 1..10: mol_type = other RNA
  misc_feature 1..10: note = Description of sequence: Splice site sequence
agtgtgaggc

SEQ ID NO: 3156 - RNA, 10 nt, synthetic construct
  source 1..10: mol_type = other RNA
  misc_feature 1..10: note = Description of sequence: Splice site sequence
gaggtttgtg

SEQ ID NO: 3157 - RNA, 10 nt, synthetic construct
  source 1..10: mol_type = other RNA
  misc_feature 1..10: note = Description of sequence: Splice site sequence
tgggtctgct

SEQ ID NO: 3158 - RNA, 10 nt, synthetic construct
  source 1..10: mol_type = other RNA
  misc_feature 1..10: note = Description of sequence: Splice site sequence
caggtgcagt

SEQ ID NO: 3159 - RNA, 10 nt, synthetic construct
  source 1..10: mol_type = other RNA
  misc_feature 1..10: note = Description of sequence: Splice site sequence
aaggtggagt

SEQ ID NO: 3160 - RNA, 10 nt, synthetic construct
  source 1..10: mol_type = other RNA
  misc_feature 1..10: note = Description of sequence: Splice site sequence
ggggtcagtt

SEQ ID NO: 3161 - RNA, 10 nt, synthetic construct
  source 1..10: mol_type = other RNA
  misc_feature 1..10: note = Description of sequence: Splice site sequence
ggggtagggt

SEQ ID NO: 3162 - RNA, 10 nt, synthetic construct
  source 1..10: mol_type = other RNA
  misc_feature 1..10: note = Description of sequence: Splice site sequence
aaggccagca

SEQ ID NO: 3163 - RNA, 10 nt, synthetic construct
  source 1..10: mol_type = other RNA
  misc_feature 1..10: note = Description of sequence: Splice site sequence
cgagtatgcc

SEQ ID NO: 3164 - RNA, 10 nt, synthetic construct
  source 1..10: mol_type = other RNA
  misc_feature 1..10: note = Description of sequence: Splice site sequence
gtggtgagcg

SEQ ID NO: 3165 - RNA, 10 nt, synthetic construct
  source 1..10: mol_type = other RNA
  misc_feature 1..10: note = Description of sequence: Splice site sequence
ggtgtatgaa

SEQ ID NO: 3166 - RNA, 10 nt, synthetic construct
  source 1..10: mol_type = other RNA
  misc_feature 1..10: note = Description of sequence: Splice site sequence
agggcgagtt

SEQ ID NO: 3167 - RNA, 10 nt, synthetic construct
  source 1..10: mol_type = other RNA
  misc_feature 1..10: note = Description of sequence: Splice site sequence
caggttttgc

SEQ ID NO: 3168 - RNA, 10 nt, synthetic construct
  source 1..10: mol_type = other RNA
  misc_feature 1..10: note = Description of sequence: Splice site sequence
tttgtgagtt

SEQ ID NO: 3169 - RNA, 10 nt, synthetic construct
  source 1..10: mol_type = other RNA
  misc_feature 1..10: note = Description of sequence: Splice site sequence
gaggtcctct

SEQ ID NO: 3170 - RNA, 10 nt, synthetic construct
  source 1..10: mol_type = other RNA
  misc_feature 1..10: note = Description of sequence: Splice site sequence
ccagcaggta

SEQ ID NO: 3171 - RNA, 10 nt, synthetic construct
  source 1..10: mol_type = other RNA
  misc_feature 1..10: note = Description of sequence: Splice site sequence
gaggttcgcg

SEQ ID NO: 3172 - RNA, 10 nt, synthetic construct
  source 1..10: mol_type = other RNA
  misc_feature 1..10: note = Description of sequence: Splice site sequence
caggcaaata

SEQ ID NO: 3173 - RNA, 10 nt, synthetic construct
  source 1..10: mol_type = other RNA
  misc_feature 1..10: note = Description of sequence: Splice site sequence
caggttaaat

SEQ ID NO: 3174 - RNA, 10 nt, synthetic construct
  source 1..10: mol_type = other RNA
  misc_feature 1..10: note = Description of sequence: Splice site sequence
ttggtaataa

SEQ ID NO: 3175 - RNA, 10 nt, synthetic construct
  source 1..10: mol_type = other RNA
  misc_feature 1..10: note = Description of sequence: Splice site sequence
tatgtaggta

SEQ ID NO: 3176 - RNA, 10 nt, synthetic construct
  source 1..10: mol_type = other RNA
  misc_feature 1..10: note = Description of sequence: Splice site sequence
aaggtgtgcc

SEQ ID NO: 3177 - RNA, 10 nt, synthetic construct
  source 1..10: mol_type = other RNA
  misc_feature 1..10: note = Description of sequence: Splice site sequence
caggcaagca

SEQ ID NO: 3178 - RNA, 10 nt, synthetic construct
  source 1..10: mol_type = other RNA
  misc_feature 1..10: note = Description of sequence: Splice site sequence
acggtaaatg

SEQ ID NO: 3179 - RNA, 10 nt, synthetic construct
  source 1..10: mol_type = other RNA
  misc_feature 1..10: note = Description of sequence: Splice site sequence
gctgtgagca

SEQ ID NO: 3180 - RNA, 10 nt, synthetic construct
  source 1..10: mol_type = other RNA
  misc_feature 1..10: note = Description of sequence: Splice site sequence
atggtacaca

SEQ ID NO: 3181 - RNA, 10 nt, synthetic construct
  source 1..10: mol_type = other RNA
  misc_feature 1..10: note = Description of sequence: Splice site sequence
gtagtgtgtt

SEQ ID NO: 3182 - RNA, 10 nt, synthetic construct
  source 1..10: mol_type = other RNA
  misc_feature 1..10: note = Description of sequence: Splice site sequence
actgtaagag

SEQ ID NO: 3183 - RNA, 10 nt, synthetic construct
  source 1..10: mol_type = other RNA
  misc_feature 1..10: note = Description of sequence: Splice site sequence
cccgcaggtc

SEQ ID NO: 3184 - RNA, 10 nt, synthetic construct
  source 1..10: mol_type = other RNA
  misc_feature 1..10: note = Description of sequence: Splice site sequence
gaggtgctgt

SEQ ID NO: 3185 - RNA, 10 nt, synthetic construct
  source 1..10: mol_type = other RNA
  misc_feature 1..10: note = Description of sequence: Splice site sequence
taagtatgct

SEQ ID NO: 3186 - RNA, 10 nt, synthetic construct
  source 1..10: mol_type = other RNA
  misc_feature 1..10: note = Description of sequence: Splice site sequence
gaggccatct

SEQ ID NO: 3187 - RNA, 10 nt, synthetic construct
  source 1..10: mol_type = other RNA
  misc_feature 1..10: note = Description of sequence: Splice site sequence
caggtgctac

SEQ ID NO: 3188 - RNA, 10 nt, synthetic construct
  source 1..10: mol_type = other RNA
  misc_feature 1..10: note = Description of sequence: Splice site sequence
gaggtgtgaa

SEQ ID NO: 3189 - RNA, 10 nt, synthetic construct
  source 1..10: mol_type = other RNA
  misc_feature 1..10: note = Description of sequence: Splice site sequence
gtggcgcgcg

SEQ ID NO: 3190 - RNA, 10 nt, synthetic construct
  source 1..10: mol_type = other RNA
  misc_feature 1..10: note = Description of sequence: Splice site sequence
taagtggagg

SEQ ID NO: 3191 - RNA, 10 nt, synthetic construct
  source 1..10: mol_type = other RNA
  misc_feature 1..10: note = Description of sequence: Splice site sequence
catgtgggta

SEQ ID NO: 3192 - RNA, 10 nt, synthetic construct
  source 1..10: mol_type = other RNA
  misc_feature 1..10: note = Description of sequence: Splice site sequence
gaggtagggt

SEQ ID NO: 3193 - RNA, 10 nt, synthetic construct
  source 1..10: mol_type = other RNA
  misc_feature 1..10: note = Description of sequence: Splice site sequence
agggttctag

SEQ ID NO: 3194 - RNA, 10 nt, synthetic construct
  source 1..10: mol_type = other RNA
  misc_feature 1..10: note = Description of sequence: Splice site sequence
tgtgtgagct

SEQ ID NO: 3195 - RNA, 10 nt, synthetic construct
  source 1..10: mol_type = other RNA
  misc_feature 1..10: note = Description of sequence: Splice site sequence
agggtgaatc

SEQ ID NO: 3196 - RNA, 10 nt, synthetic construct
  source 1..10: mol_type = other RNA
  misc_feature 1..10: note = Description of sequence: Splice site sequence
caggtcaggg

SEQ ID NO: 3197 - RNA, 10 nt, synthetic construct
  source 1..10: mol_type = other RNA
  misc_feature 1..10: note = Description of sequence: Splice site sequence
aaggtccctg

SEQ ID NO: 3198 - RNA, 10 nt, synthetic construct
  source 1..10: mol_type = other RNA
  misc_feature 1..10: note = Description of sequence: Splice site sequence
ctggtagagt

SEQ ID NO: 3199 - RNA, 10 nt, synthetic construct
  source 1..10: mol_type = other RNA
  misc_feature 1..10: note = Description of sequence: Splice site sequence
caggtgcttt

SEQ ID NO: 3200 - RNA, 10 nt, synthetic construct
  source 1..10: mol_type = other RNA
  misc_feature 1..10: note = Description of sequence: Splice site sequence
ggggtgcacg

SEQ ID NO: 3201 - RNA, 10 nt, synthetic construct
  source 1..10: mol_type = other RNA
  misc_feature 1..10: note = Description of sequence: Splice site sequence
actgtgctac

SEQ ID NO: 3202 - RNA, 10 nt, synthetic construct
  source 1..10: mol_type = other RNA
  misc_feature 1..10: note = Description of sequence: Splice site sequence
caggtaccta

SEQ ID NO: 3203 - RNA, 10 nt, synthetic construct
  source 1..10: mol_type = other RNA
  misc_feature 1..10: note = Description of sequence: Splice site sequence
agggtaatct

SEQ ID NO: 3204 - RNA, 10 nt, synthetic construct
  source 1..10: mol_type = other RNA
  misc_feature 1..10: note = Description of sequence: Splice site sequence
agggcacttg

SEQ ID NO: 3205 - RNA, 10 nt, synthetic construct
  source 1..10: mol_type = other RNA
  misc_feature 1..10: note = Description of sequence: Splice site sequence
gaggtaatgc

SEQ ID NO: 3206 - RNA, 10 nt, synthetic construct
  source 1..10: mol_type = other RNA
  misc_feature 1..10: note = Description of sequence: Splice site sequence
ccagtgagtt

SEQ ID NO: 3207 - RNA, 10 nt, synthetic construct
  source 1..10: mol_type = other RNA
  misc_feature 1..10: note = Description of sequence: Splice site sequence
ctggtgaatc

SEQ ID NO: 3208 - RNA, 10 nt, synthetic construct
  source 1..10: mol_type = other RNA
  misc_feature 1..10: note = Description of sequence: Splice site sequence
cctgcaggtg

SEQ ID NO: 3209 - RNA, 10 nt, synthetic construct
  source 1..10: mol_type = other RNA
  misc_feature 1..10: note = Description of sequence: Splice site sequence
gaggtgaggt

SEQ ID NO: 3210 - RNA, 10 nt, synthetic construct
  source 1..10: mol_type = other RNA
  misc_feature 1..10: note = Description of sequence: Splice site sequence
ctggtaaaac

SEQ ID NO: 3211 - RNA, 10 nt, synthetic construct
  source 1..10: mol_type = other RNA
  misc_feature 1..10: note = Description of sequence: Splice site sequence
tgtgtgtgct

SEQ ID NO: 3212 - RNA, 10 nt, synthetic construct
  source 1..10: mol_type = other RNA
  misc_feature 1..10: note = Description of sequence: Splice site sequence
caggttaagt

SEQ ID NO: 3213 - RNA, 10 nt, synthetic construct
  source 1..10: mol_type = other RNA
  misc_feature 1..10: note = Description of sequence: Splice site sequence
taggtatttg

SEQ ID NO: 3214 - RNA, 10 nt, synthetic construct
  source 1..10: mol_type = other RNA
  misc_feature 1..10: note = Description of sequence: Splice site sequence
agcgtgcgtg

SEQ ID NO: 3215 - RNA, 10 nt, synthetic construct
  source 1..10: mol_type = other RNA
  misc_feature 1..10: note = Description of sequence: Splice site sequence
ggggtgggca

SEQ ID NO: 3216 - RNA, 10 nt, synthetic construct
  source 1..10: mol_type = other RNA
  misc_feature 1..10: note = Description of sequence: Splice site sequence
ctggttgtta

SEQ ID NO: 3217 - RNA, 10 nt, synthetic construct
  source 1..10: mol_type = other RNA
  misc_feature 1..10: note = Description of sequence: Splice site sequence
caggtaatag

SEQ ID NO: 3218 - RNA, 10 nt, synthetic construct
  source 1..10: mol_type = other RNA
  misc_feature 1..10: note = Description of sequence: Splice site sequence
taggtgagtt

SEQ ID NO: 3219 - RNA, 10 nt, synthetic construct
  source 1..10: mol_type = other RNA
  misc_feature 1..10: note = Description of sequence: Splice site sequence
taggtaatcc

SEQ ID NO: 3220 - RNA, 10 nt, synthetic construct
  source 1..10: mol_type = other RNA
  misc_feature 1..10: note = Description of sequence: Splice site sequence
ccggtgactg

SEQ ID NO: 3221 - RNA, 10 nt, synthetic construct
  source 1..10: mol_type = other RNA
  misc_feature 1..10: note = Description of sequence: Splice site sequence
gtcgtgatta

SEQ ID NO: 3222 - RNA, 10 nt, synthetic construct
  source 1..10: mol_type = other RNA
  misc_feature 1..10: note = Description of sequence: Splice site sequence
taggtagtca

SEQ ID NO: 3223 - RNA, 10 nt, synthetic construct
  source 1..10: mol_type = other RNA
  misc_feature 1..10: note = Description of sequence: Splice site sequence
ctggtaagtc

SEQ ID NO: 3224 - RNA, 10 nt, synthetic construct
  source 1..10: mol_type = other RNA
  misc_feature 1..10: note = Description of sequence: Splice site sequence
agggtgagcg

SEQ ID NO: 3225 - RNA, 10 nt, synthetic construct
  source 1..10: mol_type = other RNA
  misc_feature 1..10: note = Description of sequence: Splice site sequence
attgtgacca

SEQ ID NO: 3226 - RNA, 10 nt, synthetic construct
  source 1..10: mol_type = other RNA
  misc_feature 1..10: note = Description of sequence: Splice site sequence
ctagcaagtg

SEQ ID NO: 3227 - RNA, 10 nt, synthetic construct
  source 1..10: mol_type = other RNA
  misc_feature 1..10: note = Description of sequence: Splice site sequence
ctggtgagat

SEQ ID NO: 3228 - RNA, 10 nt, synthetic construct
  source 1..10: mol_type = other RNA
  misc_feature 1..10: note = Description of sequence: Splice site sequence
atggctcgag

SEQ ID NO: 3229 - RNA, 10 nt, synthetic construct
  source 1..10: mol_type = other RNA
  misc_feature 1..10: note = Description of sequence: Splice site sequence
ttggtgtgta

SEQ ID NO: 3230 - RNA, 10 nt, synthetic construct
  source 1..10: mol_type = other RNA
  misc_feature 1..10: note = Description of sequence: Splice site sequence
gaggtgtctg

SEQ ID NO: 3231 - RNA, 10 nt, synthetic construct
  source 1..10: mol_type = other RNA
  misc_feature 1..10: note = Description of sequence: Splice site sequence
gaggtgggac

SEQ ID NO: 3232 - RNA, 10 nt, synthetic construct
  source 1..10: mol_type = other RNA
  misc_feature 1..10: note = Description of sequence: Splice site sequence
ggggtgggag

SEQ ID NO: 3233 - RNA, 10 nt, synthetic construct
  source 1..10: mol_type = other RNA
  misc_feature 1..10: note = Description of sequence: Splice site sequence
gcagcgtgag

SEQ ID NO: 3234 - RNA, 10 nt, synthetic construct
  source 1..10: mol_type = other RNA
  misc_feature 1..10: note = Description of sequence: Splice site sequence
ctggtatgag

SEQ ID NO: 3235 - RNA, 10 nt, synthetic construct
  source 1..10: mol_type = other RNA
  misc_feature 1..10: note = Description of sequence: Splice site sequence
aacgtaaaat

SEQ ID NO: 3236 - RNA, 10 nt, synthetic construct
  source 1..10: mol_type = other RNA
  misc_feature 1..10: note = Description of sequence: Splice site sequence
cttgtaagca

SEQ ID NO: 3237 - RNA, 10 nt, synthetic construct
  source 1..10: mol_type = other RNA
  misc_feature 1..10: note = Description of sequence: Splice site sequence
attgtaagcc

SEQ ID NO: 3238 - RNA, 10 nt, synthetic construct
  source 1..10: mol_type = other RNA
  misc_feature 1..10: note = Description of sequence: Splice site sequence
caagtatgga

SEQ ID NO: 3239 - RNA, 10 nt, synthetic construct
  source 1..10: mol_type = other RNA
  misc_feature 1..10: note = Description of sequence: Splice site sequence
gaggtcatgc

SEQ ID NO: 3240 - RNA, 10 nt, synthetic construct
  source 1..10: mol_type = other RNA
  misc_feature 1..10: note = Description of sequence: Splice site sequence
acagtgagac

SEQ ID NO: 3241 - RNA, 10 nt, synthetic construct
  source 1..10: mol_type = other RNA
  misc_feature 1..10: note = Description of sequence: Splice site sequence
caggtctgat

SEQ ID NO: 3242 - RNA, 10 nt, synthetic construct
  source 1..10: mol_type = other RNA
  misc_feature 1..10: note = Description of sequence: Splice site sequence
gaagttgggt

SEQ ID NO: 3243 - RNA, 10 nt, synthetic construct
  source 1..10: mol_type = other RNA
  misc_feature 1..10: note = Description of sequence: Splice site sequence
ggagtaaggc

SEQ ID NO: 3244 - RNA, 10 nt, synthetic construct
  source 1..10: mol_type = other RNA
  misc_feature 1..10: note = Description of sequence: Splice site sequence
aaggtcattt

SEQ ID NO: 3245 - RNA, 10 nt, synthetic construct
  source 1..10: mol_type = other RNA
  misc_feature 1..10: note = Description of sequence: Splice site sequence
caggtagtct

SEQ ID NO: 3246 - RNA, 10 nt, synthetic construct
  source 1..10: mol_type = other RNA
  misc_feature 1..10: note = Description of sequence: Splice site sequence
atggtatctg

SEQ ID NO: 3247 - RNA, 10 nt, synthetic construct
  source 1..10: mol_type = other RNA
  misc_feature 1..10: note = Description of sequence: Splice site sequence
aaagtaaagc

SEQ ID NO: 3248 - RNA, 10 nt, synthetic construct
  source 1..10: mol_type = other RNA
  misc_feature 1..10: note = Description of sequence: Splice site sequence
gaggcgggta

SEQ ID NO: 3249 - RNA, 10 nt, synthetic construct
  source 1..10: mol_type = other RNA
  misc_feature 1..10: note = Description of sequence: Splice site sequence
cgagtacgat

SEQ ID NO: 3250 - RNA, 10 nt, synthetic construct
  source 1..10: mol_type = other RNA
  misc_feature 1..10: note = Description of sequence: Splice site sequence
aaagtatggg

SEQ ID NO: 3251 - RNA, 10 nt, synthetic construct
  source 1..10: mol_type = other RNA
  misc_feature 1..10: note = Description of sequence: Splice site sequence
taggctggtc

SEQ ID NO: 3252 - RNA, 10 nt, synthetic construct
  source 1..10: mol_type = other RNA
  misc_feature 1..10: note = Description of sequence: Splice site sequence
ttggtaaaac

SEQ ID NO: 3253 - RNA, 10 nt, synthetic construct
  source 1..10: mol_type = other RNA
  misc_feature 1..10: note = Description of sequence: Splice site sequence
tgggttatgt

SEQ ID NO: 3254 - RNA, 10 nt, synthetic construct
  source 1..10: mol_type = other RNA
  misc_feature 1..10: note = Description of sequence: Splice site sequence
gatgtaacca

SEQ ID NO: 3255 - RNA, 10 nt, synthetic construct
  source 1..10: mol_type = other RNA
  misc_feature 1..10: note = Description of sequence: Splice site sequence
aaggtgcggg

SEQ ID NO: 3256 - RNA, 10 nt, synthetic construct
  source 1..10: mol_type = other RNA
  misc_feature 1..10: note = Description of sequence: Splice site sequence
ccggtacgtg

SEQ ID NO: 3257 - RNA, 10 nt, synthetic construct
  source 1..10: mol_type = other RNA
  misc_feature 1..10: note = Description of sequence: Splice site sequence
gatgtgagaa

SEQ ID NO: 3258 - RNA, 10 nt, synthetic construct
  source 1..10: mol_type = other RNA
  misc_feature 1..10: note = Description of sequence: Splice site sequence
gtggcggtga

SEQ ID NO: 3259 - RNA, 10 nt, synthetic construct
  source 1..10: mol_type = other RNA
  misc_feature 1..10: note = Description of sequence: Splice site sequence
caggtattag

SEQ ID NO: 3260 - RNA, 10 nt, synthetic construct
  source 1..10: mol_type = other RNA
  misc_feature 1..10: note = Description of sequence: Splice site sequence
gaggttggga

SEQ ID NO: 3261 - RNA, 10 nt, synthetic construct
  source 1..10: mol_type = other RNA
  misc_feature 1..10: note = Description of sequence: Splice site sequence
aaggctagta

SEQ ID NO: 3262 - RNA, 10 nt, synthetic construct
  source 1..10: mol_type = other RNA
  misc_feature 1..10: note = Description of sequence: Splice site sequence
caggcaggga

SEQ ID NO: 3263 - RNA, 10 nt, synthetic construct
  source 1..10: mol_type = other RNA
  misc_feature 1..10: note = Description of sequence: Splice site sequence
aatgttagtt

SEQ ID NO: 3264 - RNA, 10 nt, synthetic construct
  source 1..10: mol_type = other RNA
  misc_feature 1..10: note = Description of sequence: Splice site sequence
gaggtaaagg

SEQ ID NO: 3265 - RNA, 10 nt, synthetic construct
  source 1..10: mol_type = other RNA
  misc_feature 1..10: note = Description of sequence: Splice site sequence
caggccggcg

SEQ ID NO: 3266 - RNA, 10 nt, synthetic construct
  source 1..10: mol_type = other RNA
  misc_feature 1..10: note = Description of sequence: Splice site sequence
taagtacttg

SEQ ID NO: 3267 - RNA, 10 nt, synthetic construct
  source 1..10: mol_type = other RNA
  misc_feature 1..10: note = Description of sequence: Splice site sequence
tcggtagggg

SEQ ID NO: 3268 - RNA, 10 nt, synthetic construct
  source 1..10: mol_type = other RNA
  misc_feature 1..10: note = Description of sequence: Splice site sequence
cccgtgagat

SEQ ID NO: 3269 - RNA, 10 nt, synthetic construct
  source 1..10: mol_type = other RNA
  misc_feature 1..10: note = Description of sequence: Splice site sequence
gtggttgttt

SEQ ID NO: 3270 - RNA, 10 nt, synthetic construct
  source 1..10: mol_type = other RNA
  misc_feature 1..10: note = Description of sequence: Splice site sequence
gaggtaagac

SEQ ID NO: 3271 - RNA, 10 nt, synthetic construct
  source 1..10: mol_type = other RNA
  misc_feature 1..10: note = Description of sequence: Splice site sequence
gatgtaggtc

SEQ ID NO: 3272 - RNA, 10 nt, synthetic construct
  source 1..10: mol_type = other RNA
  misc_feature 1..10: note = Description of sequence: Splice site sequence
gaggttgggg

SEQ ID NO: 3273 - RNA, 10 nt, synthetic construct
  source 1..10: mol_type = other RNA
  misc_feature 1..10: note = Description of sequence: Splice site sequence
gaggcgagta

SEQ ID NO: 3274 - RNA, 10 nt, synthetic construct
  source 1..10: mol_type = other RNA
  misc_feature 1..10: note = Description of sequence: Splice site sequence
ccagcgtaat

SEQ ID NO: 3275 - RNA, 10 nt, synthetic construct
  source 1..10: mol_type = other RNA
  misc_feature 1..10: note = Description of sequence: Splice site sequence
acggtgaggt

SEQ ID NO: 3276 - RNA, 10 nt, synthetic construct
  source 1..10: mol_type = other RNA
  misc_feature 1..10: note = Description of sequence: Splice site sequence
ggggtatatt

SEQ ID NO: 3277 - RNA, 10 nt, synthetic construct
  source 1..10: mol_type = other RNA
  misc_feature 1..10: note = Description of sequence: Splice site sequence
tatgtaaatt

SEQ ID NO: 3278 - RNA, 10 nt, synthetic construct
  source 1..10: mol_type = other RNA
  misc_feature 1..10: note = Description of sequence: Splice site sequence
acggtactta

SEQ ID NO: 3279 - RNA, 10 nt, synthetic construct
  source 1..10: mol_type = other RNA
  misc_feature 1..10: note = Description of sequence: Splice site sequence
gaggtcagca

SEQ ID NO: 3280 - RNA, 10 nt, synthetic construct
  source 1..10: mol_type = other RNA
  misc_feature 1..10: note = Description of sequence: Splice site sequence
ggggtcagac

SEQ ID NO: 3281 - RNA, 10 nt, synthetic construct
  source 1..10: mol_type = other RNA
  misc_feature 1..10: note = Description of sequence: Splice site sequence
aatgtgtgag

SEQ ID NO: 3282 - RNA, 10 nt, synthetic construct
  source 1..10: mol_type = other RNA
  misc_feature 1..10: note = Description of sequence: Splice site sequence
tccgtcagta

SEQ ID NO: 3283 - RNA, 10 nt, synthetic construct
  source 1..10: mol_type = other RNA
  misc_feature 1..10: note = Description of sequence: Splice site sequence
ccagttagtg

SEQ ID NO: 3284 - RNA, 10 nt, synthetic construct
  source 1..10: mol_type = other RNA
  misc_feature 1..10: note = Description of sequence: Splice site sequence
agggtgcatg

SEQ ID NO: 3285 - RNA, 10 nt, synthetic construct
  source 1..10: mol_type = other RNA
  misc_feature 1..10: note = Description of sequence: Splice site sequence
ggggtaggat

SEQ ID NO: 3286 - RNA, 10 nt, synthetic construct
  source 1..10: mol_type = other RNA
  misc_feature 1..10: note = Description of sequence: Splice site sequence
gaggtgttcg

SEQ ID NO: 3287 - RNA, 10 nt, synthetic construct
  source 1..10: mol_type = other RNA
  misc_feature 1..10: note = Description of sequence: Splice site sequence
ttggcaagaa

SEQ ID NO: 3288 - RNA, 10 nt, synthetic construct
  source 1..10: mol_type = other RNA
  misc_feature 1..10: note = Description of sequence: Splice site sequence
tccgtaagta

SEQ ID NO: 3289 - RNA, 10 nt, synthetic construct
  source 1..10: mol_type = other RNA
  misc_feature 1..10: note = Description of sequence: Splice site sequence
caggtgtaag

SEQ ID NO: 3290 - RNA, 10 nt, synthetic construct
  source 1..10: mol_type = other RNA
  misc_feature 1..10: note = Description of sequence: Splice site sequence
gaggtgtttt

SEQ ID NO: 3291 - RNA, 10 nt, synthetic construct
  source 1..10: mol_type = other RNA
  misc_feature 1..10: note = Description of sequence: Splice site sequence
gtagtgagct

SEQ ID NO: 3292 - RNA, 10 nt, synthetic construct
  source 1..10: mol_type = other RNA
  misc_feature 1..10: note = Description of sequence: Splice site sequence
caggtgaaaa

SEQ ID NO: 3293 - RNA, 10 nt, synthetic construct
  source 1..10: mol_type = other RNA
  misc_feature 1..10: note = Description of sequence: Splice site sequence
agggtacagg

SEQ ID NO: 3294 - RNA, 10 nt, synthetic construct
  source 1..10: mol_type = other RNA
  misc_feature 1..10: note = Description of sequence: Splice site sequence
aaggtaacgc

SEQ ID NO: 3295 - RNA, 10 nt, synthetic construct
  source 1..10: mol_type = other RNA
  misc_feature 1..10: note = Description of sequence: Splice site sequence
aaggtatacc

SEQ ID NO: 3296 - RNA, 10 nt, synthetic construct
  source 1..10: mol_type = other RNA
  misc_feature 1..10: note = Description of sequence: Splice site sequence
cctgtgagat

SEQ ID NO: 3297 - RNA, 10 nt, synthetic construct
  source 1..10: mol_type = other RNA
  misc_feature 1..10: note = Description of sequence: Splice site sequence
ggggtacgtg

SEQ ID NO: 3298 - RNA, 10 nt, synthetic construct
  source 1..10: mol_type = other RNA
  misc_feature 1..10: note = Description of sequence: Splice site sequence
gaagtaggag

SEQ ID NO: 3299 - RNA, 10 nt, synthetic construct
  source 1..10: mol_type = other RNA
  misc_feature 1..10: note = Description of sequence: Splice site sequence
tcggtaaggg

SEQ ID NO: 3300 - RNA, 10 nt, synthetic construct
  source 1..10: mol_type = other RNA
  misc_feature 1..10: note = Description of sequence: Splice site sequence
ccggtaagcg

SEQ ID NO: 3301 - RNA, 10 nt, synthetic construct
  source 1..10: mol_type = other RNA
  misc_feature 1..10: note = Description of sequence: Splice site sequence
ccagtttttg

SEQ ID NO: 3302 - RNA, 10 nt, synthetic construct
  source 1..10: mol_type = other RNA
  misc_feature 1..10: note = Description of sequence: Splice site sequence
aaggtgctgt

SEQ ID NO: 3303 - RNA, 10 nt, synthetic construct
  source 1..10: mol_type = other RNA
  misc_feature 1..10: note = Description of sequence: Splice site sequence
aaagtacacc

SEQ ID NO: 3304 - RNA, 10 nt, synthetic construct
  source 1..10: mol_type = other RNA
  misc_feature 1..10: note = Description of sequence: Splice site sequence
gaagtacgtg

SEQ ID NO: 3305 - RNA, 10 nt, synthetic construct
  source 1..10: mol_type = other RNA
  misc_feature 1..10: note = Description of sequence: Splice site sequence
tgtgtagggg

SEQ ID NO: 3306 - RNA, 10 nt, synthetic construct
  source 1..10: mol_type = other RNA
  misc_feature 1..10: note = Description of sequence: Splice site sequence
ttggtgaggc

SEQ ID NO: 3307 - RNA, 10 nt, synthetic construct
  source 1..10: mol_type = other RNA
  misc_feature 1..10: note = Description of sequence: Splice site sequence
caggtcctcc

SEQ ID NO: 3308 - RNA, 10 nt, synthetic construct
  source 1..10: mol_type = other RNA
  misc_feature 1..10: note = Description of sequence: Splice site sequence
atggtctgta

SEQ ID NO: 3309 - RNA, 10 nt, synthetic construct
  source 1..10: mol_type = other RNA
  misc_feature 1..10: note = Description of sequence: Splice site sequence
catgcaggtg

SEQ ID NO: 3310 - RNA, 10 nt, synthetic construct
  source 1..10: mol_type = other RNA
  misc_feature 1..10: note = Description of sequence: Splice site sequence
ctggtacacc

SEQ ID NO: 3311 - RNA, 10 nt, synthetic construct
  source 1..10: mol_type = other RNA
  misc_feature 1..10: note = Description of sequence: Splice site sequence
caggtcctta

SEQ ID NO: 3312 - RNA, 10 nt, synthetic construct
  source 1..10: mol_type = other RNA
  misc_feature 1..10: note = Description of sequence: Splice site sequence
atggcagcct

SEQ ID NO: 3313 - RNA, 10 nt, synthetic construct
  source 1..10: mol_type = other RNA
  misc_feature 1..10: note = Description of sequence: Splice site sequence
aacgtgaggc

SEQ ID NO: 3314 - RNA, 10 nt, synthetic construct
  source 1..10: mol_type = other RNA
  misc_feature 1..10: note = Description of sequence: Splice site sequence
acggtccagg

SEQ ID NO: 3315 - RNA, 10 nt, synthetic construct
  source 1..10: mol_type = other RNA
  misc_feature 1..10: note = Description of sequence: Splice site sequence
tctgtacata

SEQ ID NO: 3316 - RNA, 10 nt, synthetic construct
  source 1..10: mol_type = other RNA
  misc_feature 1..10: note = Description of sequence: Splice site sequence
gaggtgatta

SEQ ID NO: 3317 - RNA, 10 nt, synthetic construct
  source 1..10: mol_type = other RNA
  misc_feature 1..10: note = Description of sequence: Splice site sequence
acggtaaata

SEQ ID NO: 3318 - RNA, 10 nt, synthetic construct
  source 1..10: mol_type = other RNA
  misc_feature 1..10: note = Description of sequence: Splice site sequence
atggtaactg

SEQ ID NO: 3319 - RNA, 10 nt, synthetic construct
  source 1..10: mol_type = other RNA
  misc_feature 1..10: note = Description of sequence: Splice site sequence
caggcgcgtt

SEQ ID NO: 3320 - RNA, 10 nt, synthetic construct
  source 1..10: mol_type = other RNA
  misc_feature 1..10: note = Description of sequence: Splice site sequence
aaggtttgtt

SEQ ID NO: 3321 - RNA, 10 nt, synthetic construct
  source 1..10: mol_type = other RNA
  misc_feature 1..10: note = Description of sequence: Splice site sequence
caggttagga

SEQ ID NO: 3322 - RNA, 10 nt, synthetic construct
  source 1..10: mol_type = other RNA
  misc_feature 1..10: note = Description of sequence: Splice site sequence
atggtgactg

SEQ ID NO: 3323 - RNA, 10 nt, synthetic construct
  source 1..10: mol_type = other RNA
  misc_feature 1..10: note = Description of sequence: Splice site sequence
ttggtatccc

SEQ ID NO: 3324 - RNA, 10 nt, synthetic construct
  source 1..10: mol_type = other RNA
  misc_feature 1..10: note = Description of sequence: Splice site sequence
cttgtaggac

SEQ ID NO: 3325 - RNA, 10 nt, synthetic construct
  source 1..10: mol_type = other RNA
  misc_feature 1..10: note = Description of sequence: Splice site sequence
ggggtatggc

SEQ ID NO: 3326 - RNA, 10 nt, synthetic construct
  source 1..10: mol_type = other RNA
  misc_feature 1..10: note = Description of sequence: Splice site sequence
ggggtaggac

SEQ ID NO: 3327 - RNA, 10 nt, synthetic construct
  source 1..10: mol_type = other RNA
  misc_feature 1..10: note = Description of sequence: Splice site sequence
atcgtaagct

SEQ ID NO: 3328 - RNA, 10 nt, synthetic construct
  source 1..10: mol_type = other RNA
  misc_feature 1..10: note = Description of sequence: Splice site sequence
ggtgtgagca

SEQ ID NO: 3329 - RNA, 10 nt, synthetic construct
  source 1..10: mol_type = other RNA
  misc_feature 1..10: note = Description of sequence: Splice site sequence
ctggttggta

SEQ ID NO: 3330 - RNA, 10 nt, synthetic construct
  source 1..10: mol_type = other RNA
  misc_feature 1..10: note = Description of sequence: Splice site sequence
ggggttaggg

SEQ ID NO: 3331 - RNA, 10 nt, synthetic construct
  source 1..10: mol_type = other RNA
  misc_feature 1..10: note = Description of sequence: Splice site sequence
tgagtaagaa

SEQ ID NO: 3332 - RNA, 10 nt, synthetic construct
  source 1..10: mol_type = other RNA
  misc_feature 1..10: note = Description of sequence: Splice site sequence
caggctcgtg

SEQ ID NO: 3333 - RNA, 10 nt, synthetic construct
  source 1..10: mol_type = other RNA
  misc_feature 1..10: note = Description of sequence: Splice site sequence
taggtagagt

SEQ ID NO: 3334 - RNA, 10 nt, synthetic construct
  source 1..10: mol_type = other RNA
  misc_feature 1..10: note = Description of sequence: Splice site sequence
taggtgccct

SEQ ID NO: 3335 - RNA, 10 nt, synthetic construct
  source 1..10: mol_type = other RNA
  misc_feature 1..10: note = Description of sequence: Splice site sequence
accgtgtgta

SEQ ID NO: 3336 - RNA, 10 nt, synthetic construct
  source 1..10: mol_type = other RNA
  misc_feature 1..10: note = Description of sequence: Splice site sequence
tatgtagtat

SEQ ID NO: 3337 - RNA, 10 nt, synthetic construct
  source 1..10: mol_type = other RNA
  misc_feature 1..10: note = Description of sequence: Splice site sequence
tgggtaatag

SEQ ID NO: 3338 - RNA, 10 nt, synthetic construct
  source 1..10: mol_type = other RNA
  misc_feature 1..10: note = Description of sequence: Splice site sequence
caggtctgaa

SEQ ID NO: 3339 - RNA, 10 nt, synthetic construct
  source 1..10: mol_type = other RNA
  misc_feature 1..10: note = Description of sequence: Splice site sequence
aaagtataaa

SEQ ID NO: 3340 - RNA, 10 nt, synthetic construct
  source 1..10: mol_type = other RNA
  misc_feature 1..10: note = Description of sequence: Splice site sequence
gtggtgagtc

SEQ ID NO: 3341 - RNA, 10 nt, synthetic construct
  source 1..10: mol_type = other RNA
  misc_feature 1..10: note = Description of sequence: Splice site sequence
agtgtgatta

SEQ ID NO: 3342 - RNA, 10 nt, synthetic construct
  source 1..10: mol_type = other RNA
  misc_feature 1..10: note = Description of sequence: Splice site sequence
gaagttgtag

SEQ ID NO: 3343 - RNA, 10 nt, synthetic construct
  source 1..10: mol_type = other RNA
  misc_feature 1..10: note = Description of sequence: Splice site sequence
ggtgttaata

SEQ ID NO: 3344 - RNA, 10 nt, synthetic construct
  source 1..10: mol_type = other RNA
  misc_feature 1..10: note = Description of sequence: Splice site sequence
caagtactcg

SEQ ID NO: 3345 - RNA, 10 nt, synthetic construct
  source 1..10: mol_type = other RNA
  misc_feature 1..10: note = Description of sequence: Splice site sequence
acggtgaggg

SEQ ID NO: 3346 - RNA, 10 nt, synthetic construct
  source 1..10: mol_type = other RNA
  misc_feature 1..10: note = Description of sequence: Splice site sequence
tgagcaggca

SEQ ID NO: 3347 - RNA, 10 nt, synthetic construct
  source 1..10: mol_type = other RNA
  misc_feature 1..10: note = Description of sequence: Splice site sequence
ggggtgaccg

SEQ ID NO: 3348 - RNA, 10 nt, synthetic construct
  source 1..10: mol_type = other RNA
  misc_feature 1..10: note = Description of sequence: Splice site sequence
cgggtttgtg

SEQ ID NO: 3349 - RNA, 10 nt, synthetic construct
  source 1..10: mol_type = other RNA
  misc_feature 1..10: note = Description of sequence: Splice site sequence
gtggtatgga

SEQ ID NO: 3350 - RNA, 10 nt, synthetic construct
  source 1..10: mol_type = other RNA
  misc_feature 1..10: note = Description of sequence: Splice site sequence
aaggcgggaa

SEQ ID NO: 3351 - RNA, 10 nt, synthetic construct
  source 1..10: mol_type = other RNA
  misc_feature 1..10: note = Description of sequence: Splice site sequence
agggtaaaac

SEQ ID NO: 3352 - RNA, 10 nt, synthetic construct
  source 1..10: mol_type = other RNA
  misc_feature 1..10: note = Description of sequence: Splice site sequence
agggtatgtt

SEQ ID NO: 3353 - RNA, 10 nt, synthetic construct
  source 1..10: mol_type = other RNA
  misc_feature 1..10: note = Description of sequence: Splice site sequence
caggcatgta

SEQ ID NO: 3354 - RNA, 10 nt, synthetic construct
  source 1..10: mol_type = other RNA
  misc_feature 1..10: note = Description of sequence: Splice site sequence
aaggtcatgc

SEQ ID NO: 3355 - RNA, 10 nt, synthetic construct
  source 1..10: mol_type = other RNA
  misc_feature 1..10: note = Description of sequence: Splice site sequence
gatgtacgtt

SEQ ID NO: 3356 - RNA, 10 nt, synthetic construct
  source 1..10: mol_type = other RNA
  misc_feature 1..10: note = Description of sequence: Splice site sequence
acagtacgtg

SEQ ID NO: 3357 - RNA, 10 nt, synthetic construct
  source 1..10: mol_type = other RNA
  misc_feature 1..10: note = Description of sequence: Splice site sequence
acggtaccca

SEQ ID NO: 3358 - RNA, 10 nt, synthetic construct
  source 1..10: mol_type = other RNA
  misc_feature 1..10: note = Description of sequence: Splice site sequence
caggtagtgc

SEQ ID NO: 3359 - RNA, 10 nt, synthetic construct
  source 1..10: mol_type = other RNA
  misc_feature 1..10: note = Description of sequence: Splice site sequence
acagtaagag

SEQ ID NO: 3360 - RNA, 10 nt, synthetic construct
  source 1..10: mol_type = other RNA
  misc_feature 1..10: note = Description of sequence: Splice site sequence
ggtgcacacc

SEQ ID NO: 3361 - RNA, 10 nt, synthetic construct
  source 1..10: mol_type = other RNA
  misc_feature 1..10: note = Description of sequence: Splice site sequence
gaggtgtaac

SEQ ID NO: 3362 - RNA, 10 nt, synthetic construct
  source 1..10: mol_type = other RNA
  misc_feature 1..10: note = Description of sequence: Splice site sequence
taggtactta

SEQ ID NO: 3363 - RNA, 10 nt, synthetic construct
  source 1..10: mol_type = other RNA
  misc_feature 1..10: note = Description of sequence: Splice site sequence
gcggtactgc

SEQ ID NO: 3364 - RNA, 10 nt, synthetic construct
  source 1..10: mol_type = other RNA
  misc_feature 1..10: note = Description of sequence: Splice site sequence
caggtaggat

SEQ ID NO: 3365 - RNA, 10 nt, synthetic construct
  source 1..10: mol_type = other RNA
  misc_feature 1..10: note = Description of sequence: Splice site sequence
caggtctggc

SEQ ID NO: 3366 - RNA, 10 nt, synthetic construct
  source 1..10: mol_type = other RNA
  misc_feature 1..10: note = Description of sequence: Splice site sequence
gtggttttaa

SEQ ID NO: 3367 - RNA, 10 nt, synthetic construct
  source 1..10: mol_type = other RNA
  misc_feature 1..10: note = Description of sequence: Splice site sequence
cgagtgagcc

SEQ ID NO: 3368 - RNA, 10 nt, synthetic construct
  source 1..10: mol_type = other RNA
  misc_feature 1..10: note = Description of sequence: Splice site sequence
agtgttgtca

SEQ ID NO: 3369 - RNA, 10 nt, synthetic construct
  source 1..10: mol_type = other RNA
  misc_feature 1..10: note = Description of sequence: Splice site sequence
taagtatgtt

SEQ ID NO: 3370 - RNA, 10 nt, synthetic construct
  source 1..10: mol_type = other RNA
  misc_feature 1..10: note = Description of sequence: Splice site sequence
aaggttgagc

SEQ ID NO: 3371 - RNA, 10 nt, synthetic construct
  source 1..10: mol_type = other RNA
  misc_feature 1..10: note = Description of sequence: Splice site sequence
ggtgtaagta

SEQ ID NO: 3372 - RNA, 10 nt, synthetic construct
  source 1..10: mol_type = other RNA
  misc_feature 1..10: note = Description of sequence: Splice site sequence
caggtataat

SEQ ID NO: 3373 - RNA, 10 nt, synthetic construct
  source 1..10: mol_type = other RNA
  misc_feature 1..10: note = Description of sequence: Splice site sequence
atggtaccaa

SEQ ID NO: 3374 - RNA, 10 nt, synthetic construct
  source 1..10: mol_type = other RNA
  misc_feature 1..10: note = Description of sequence: Splice site sequence
tgagtcagaa

SEQ ID NO: 3375 - RNA, 10 nt, synthetic construct
  source 1..10: mol_type = other RNA
  misc_feature 1..10: note = Description of sequence: Splice site sequence
aaggcaatta

SEQ ID NO: 3376 - RNA, 10 nt, synthetic construct
  source 1..10: mol_type = other RNA
  misc_feature 1..10: note = Description of sequence: Splice site sequence
ttggtaagat

SEQ ID NO: 3377 - RNA, 10 nt, synthetic construct
  source 1..10: mol_type = other RNA
  misc_feature 1..10: note = Description of sequence: Splice site sequence
agagttagag

SEQ ID NO: 3378 - RNA, 10 nt, synthetic construct
  source 1..10: mol_type = other RNA
  misc_feature 1..10: note = Description of sequence: Splice site sequence
gaggtattac

SEQ ID NO: 3379 - RNA, 10 nt, synthetic construct
  source 1..10: mol_type = other RNA
  misc_feature 1..10: note = Description of sequence: Splice site sequence
acggtacaga

SEQ ID NO: 3380 - RNA, 10 nt, synthetic construct
  source 1..10: mol_type = other RNA
  misc_feature 1..10: note = Description of sequence: Splice site sequence
agtgtaggct

SEQ ID NO: 3381 - RNA, 10 nt, synthetic construct
  source 1..10: mol_type = other RNA
  misc_feature 1..10: note = Description of sequence: Splice site sequence
aaagtaagcg

SEQ ID NO: 3382 - RNA, 10 nt, synthetic construct
  source 1..10: mol_type = other RNA
  misc_feature 1..10: note = Description of sequence: Splice site sequence
cctgtaagcc

SEQ ID NO: 3383 - RNA, 10 nt, synthetic construct
  source 1..10: mol_type = other RNA
  misc_feature 1..10: note = Description of sequence: Splice site sequence
agggtgattt

SEQ ID NO: 3384 - RNA, 10 nt, synthetic construct
  source 1..10: mol_type = other RNA
  misc_feature 1..10: note = Description of sequence: Splice site sequence
tgtgtatgaa

SEQ ID NO: 3385 - RNA, 10 nt, synthetic construct
  source 1..10: mol_type = other RNA
  misc_feature 1..10: note = Description of sequence: Splice site sequence
ctggtacaca

SEQ ID NO: 3386 - RNA, 10 nt, synthetic construct
  source 1..10: mol_type = other RNA
  misc_feature 1..10: note = Description of sequence: Splice site sequence
agggtagaga

SEQ ID NO: 3387 - RNA, 10 nt, synthetic construct
  source 1..10: mol_type = other RNA
  misc_feature 1..10: note = Description of sequence: Splice site sequence
agagtatgta

SEQ ID NO: 3388 - RNA, 10 nt, synthetic construct
  source 1..10: mol_type = other RNA
  misc_feature 1..10: note = Description of sequence: Splice site sequence
ttggtcagca

SEQ ID NO: 3389 - RNA, 10 nt, synthetic construct
  source 1..10: mol_type = other RNA
  misc_feature 1..10: note = Description of sequence: Splice site sequence
agggtgcggg

SEQ ID NO: 3390 - RNA, 10 nt, synthetic construct
  source 1..10: mol_type = other RNA
  misc_feature 1..10: note = Description of sequence: Splice site sequence
aaagtgatga

SEQ ID NO: 3391 - RNA, 10 nt, synthetic construct
  source 1..10: mol_type = other RNA
  misc_feature 1..10: note = Description of sequence: Splice site sequence
tgcgtgagta

SEQ ID NO: 3392 - RNA, 10 nt, synthetic construct
  source 1..10: mol_type = other RNA
  misc_feature 1..10: note = Description of sequence: Splice site sequence
aaggtacaca

SEQ ID NO: 3393 - RNA, 10 nt, synthetic construct
  source 1..10: mol_type = other RNA
  misc_feature 1..10: note = Description of sequence: Splice site sequence
gcggtgagat

SEQ ID NO: 3394 - RNA, 10 nt, synthetic construct
  source 1..10: mol_type = other RNA
  misc_feature 1..10: note = Description of sequence: Splice site sequence
cctgtaggtt

SEQ ID NO: 3395 - RNA, 10 nt, synthetic construct
  source 1..10: mol_type = other RNA
  misc_feature 1..10: note = Description of sequence: Splice site sequence
aaggtgattc

SEQ ID NO: 3396 - RNA, 10 nt, synthetic construct
  source 1..10: mol_type = other RNA
  misc_feature 1..10: note = Description of sequence: Splice site sequence
gttgtaagtg

SEQ ID NO: 3397 - RNA, 10 nt, synthetic construct
  source 1..10: mol_type = other RNA
  misc_feature 1..10: note = Description of sequence: Splice site sequence
atagtaggga

SEQ ID NO: 3398 - RNA, 10 nt, synthetic construct
  source 1..10: mol_type = other RNA
  misc_feature 1..10: note = Description of sequence: Splice site sequence
ggggttcgct

SEQ ID NO: 3399 - RNA, 10 nt, synthetic construct
  source 1..10: mol_type = other RNA
  misc_feature 1..10: note = Description of sequence: Splice site sequence
ccggtcagag

SEQ ID NO: 3400 - RNA, 10 nt, synthetic construct
  source 1..10: mol_type = other RNA
  misc_feature 1..10: note = Description of sequence: Splice site sequence
gtagtatgag

SEQ ID NO: 3401 - RNA, 10 nt, synthetic construct
  source 1..10: mol_type = other RNA
  misc_feature 1..10: note = Description of sequence: Splice site sequence
cgtgtaagat

SEQ ID NO: 3402 - RNA, 10 nt, synthetic construct
  source 1..10: mol_type = other RNA
  misc_feature 1..10: note = Description of sequence: Splice site sequence
tgagtaggca

SEQ ID NO: 3403 - RNA, 10 nt, synthetic construct
  source 1..10: mol_type = other RNA
  misc_feature 1..10: note = Description of sequence: Splice site sequence
tcagtatgta

SEQ ID NO: 3404 - RNA, 10 nt, synthetic construct
  source 1..10: mol_type = other RNA
  misc_feature 1..10: note = Description of sequence: Splice site sequence
agagtatttt

SEQ ID NO: 3405 - RNA, 10 nt, synthetic construct
  source 1..10: mol_type = other RNA
  misc_feature 1..10: note = Description of sequence: Splice site sequence
aaggttgtag

SEQ ID NO: 3406 - RNA, 10 nt, synthetic construct
  source 1..10: mol_type = other RNA
  misc_feature 1..10: note = Description of sequence: Splice site sequence
tcggtgcgga

SEQ ID NO: 3407 - RNA, 10 nt, synthetic construct
  source 1..10: mol_type = other RNA
  misc_feature 1..10: note = Description of sequence: Splice site sequence
gaagttagat

SEQ ID NO: 3408 - RNA, 10 nt, synthetic construct
  source 1..10: mol_type = other RNA
  misc_feature 1..10: note = Description of sequence: Splice site sequence
gctgtgagac

SEQ ID NO: 3409 - RNA, 10 nt, synthetic construct
  source 1..10: mol_type = other RNA
  misc_feature 1..10: note = Description of sequence: Splice site sequence
caggcaggta

SEQ ID NO: 3410 - RNA, 10 nt, synthetic construct
  source 1..10: mol_type = other RNA
  misc_feature 1..10: note = Description of sequence: Splice site sequence
taagttaaga

SEQ ID NO: 3411 - RNA, 10 nt, synthetic construct
  source 1..10: mol_type = other RNA
  misc_feature 1..10: note = Description of sequence: Splice site sequence
gaggcaggca

SEQ ID NO: 3412 - RNA, 10 nt, synthetic construct
  source 1..10: mol_type = other RNA
  misc_feature 1..10: note = Description of sequence: Splice site sequence
aaggtgccta

SEQ ID NO: 3413 - RNA, 10 nt, synthetic construct
  source 1..10: mol_type = other RNA
  misc_feature 1..10: note = Description of sequence: Splice site sequence
cgggtgtgag

SEQ ID NO: 3414 - RNA, 10 nt, synthetic construct
  source 1..10: mol_type = other RNA
  misc_feature 1..10: note = Description of sequence: Splice site sequence
ggggtgtgag

SEQ ID NO: 3415 - RNA, 10 nt, synthetic construct
  source 1..10: mol_type = other RNA
  misc_feature 1..10: note = Description of sequence: Splice site sequence
tccgtgggtc

SEQ ID NO: 3416 - RNA, 10 nt, synthetic construct
  source 1..10: mol_type = other RNA
  misc_feature 1..10: note = Description of sequence: Splice site sequence
acggtaaatc

SEQ ID NO: 3417 - RNA, 10 nt, synthetic construct
  source 1..10: mol_type = other RNA
  misc_feature 1..10: note = Description of sequence: Splice site sequence
tcagtaggta

SEQ ID NO: 3418 - RNA, 10 nt, synthetic construct
  source 1..10: mol_type = other RNA
  misc_feature 1..10: note = Description of sequence: Splice site sequence
caggcggtgg

SEQ ID NO: 3419 - RNA, 10 nt, synthetic construct
  source 1..10: mol_type = other RNA
  misc_feature 1..10: note = Description of sequence: Splice site sequence
cgagtaagct

SEQ ID NO: 3420 - RNA, 10 nt, synthetic construct
  source 1..10: mol_type = other RNA
  misc_feature 1..10: note = Description of sequence: Splice site sequence
cccgtgagca

SEQ ID NO: 3421 - RNA, 10 nt, synthetic construct
  source 1..10: mol_type = other RNA
  misc_feature 1..10: note = Description of sequence: Splice site sequence
aaagtaatga

SEQ ID NO: 3422 - RNA, 10 nt, synthetic construct
  source 1..10: mol_type = other RNA
  misc_feature 1..10: note = Description of sequence: Splice site sequence
cgggtaacca

SEQ ID NO: 3423 - RNA, 10 nt, synthetic construct
  source 1..10: mol_type = other RNA
  misc_feature 1..10: note = Description of sequence: Splice site sequence
caggtcgcac

SEQ ID NO: 3424 - RNA, 10 nt, synthetic construct
  source 1..10: mol_type = other RNA
  misc_feature 1..10: note = Description of sequence: Splice site sequence
gaggtaggcc

SEQ ID NO: 3425 - RNA, 10 nt, synthetic construct
  source 1..10: mol_type = other RNA
  misc_feature 1..10: note = Description of sequence: Splice site sequence
taggtaggca

SEQ ID NO: 3426 - RNA, 10 nt, synthetic construct
  source 1..10: mol_type = other RNA
  misc_feature 1..10: note = Description of sequence: Splice site sequence
gcggtgcgtg

SEQ ID NO: 3427 - RNA, 10 nt, synthetic construct
  source 1..10: mol_type = other RNA
  misc_feature 1..10: note = Description of sequence: Splice site sequence
gaggtcacac

SEQ ID NO: 3428 - RNA, 10 nt, synthetic construct
  source 1..10: mol_type = other RNA
  misc_feature 1..10: note = Description of sequence: Splice site sequence
caggtaggcc

SEQ ID NO: 3429 - RNA, 10 nt, synthetic construct
  source 1..10: mol_type = other RNA
  misc_feature 1..10: note = Description of sequence: Splice site sequence
caagtgctga

SEQ ID NO: 3430 - RNA, 10 nt, synthetic construct
  source 1..10: mol_type = other RNA
  misc_feature 1..10: note = Description of sequence: Splice site sequence
gtcgtcttca

SEQ ID NO: 3431 - RNA, 10 nt, synthetic construct
  source 1..10: mol_type = other RNA
  misc_feature 1..10: note = Description of sequence: Splice site sequence
gtagtaagga

SEQ ID NO: 3432 - RNA, 10 nt, synthetic construct
  source 1..10: mol_type = other RNA
  misc_feature 1..10: note = Description of sequence: Splice site sequence
caagttagag

SEQ ID NO: 3433 - RNA, 10 nt, synthetic construct
  source 1..10: mol_type = other RNA
  misc_feature 1..10: note = Description of sequence: Splice site sequence
acagtgaatc

SEQ ID NO: 3434 - RNA, 10 nt, synthetic construct
  source 1..10: mol_type = other RNA
  misc_feature 1..10: note = Description of sequence: Splice site sequence
aaggtagtat

SEQ ID NO: 3435 - RNA, 10 nt, synthetic construct
  source 1..10: mol_type = other RNA
  misc_feature 1..10: note = Description of sequence: Splice site sequence
actgtcagtc

SEQ ID NO: 3436 - RNA, 10 nt, synthetic construct
  source 1..10: mol_type = other RNA
  misc_feature 1..10: note = Description of sequence: Splice site sequence
tctgcagcct

SEQ ID NO: 3437 - RNA, 10 nt, synthetic construct
  source 1..10: mol_type = other RNA
  misc_feature 1..10: note = Description of sequence: Splice site sequence
cgagtaagtg

SEQ ID NO: 3438 - RNA, 10 nt, synthetic construct
  source 1..10: mol_type = other RNA
  misc_feature 1..10: note = Description of sequence: Splice site sequence
agagtaatta

SEQ ID NO: 3439 - RNA, 10 nt, synthetic construct
  source 1..10: mol_type = other RNA
  misc_feature 1..10: note = Description of sequence: Splice site sequence
ccggtgagcg

SEQ ID NO: 3440 - RNA, 10 nt, synthetic construct
  source 1..10: mol_type = other RNA
  misc_feature 1..10: note = Description of sequence: Splice site sequence
aaggtaacct

SEQ ID NO: 3441 - RNA, 10 nt, synthetic construct
  source 1..10: mol_type = other RNA
  misc_feature 1..10: note = Description of sequence: Splice site sequence
aaggttgtgg

SEQ ID NO: 3442 - RNA, 10 nt, synthetic construct
  source 1..10: mol_type = other RNA
  misc_feature 1..10: note = Description of sequence: Splice site sequence
aaggcatggg

SEQ ID NO: 3443 - RNA, 10 nt, synthetic construct
  source 1..10: mol_type = other RNA
  misc_feature 1..10: note = Description of sequence: Splice site sequence
acggtaaggt

SEQ ID NO: 3444 - RNA, 10 nt, synthetic construct
  source 1..10: mol_type = other RNA
  misc_feature 1..10: note = Description of sequence: Splice site sequence
ggggtgagca

SEQ ID NO: 3445 - RNA, 10 nt, synthetic construct
  source 1..10: mol_type = other RNA
  misc_feature 1..10: note = Description of sequence: Splice site sequence
gaggttgctt

SEQ ID NO: 3446 - RNA, 10 nt, synthetic construct
  source 1..10: mol_type = other RNA
  misc_feature 1..10: note = Description of sequence: Splice site sequence
aaggtatcgc

SEQ ID NO: 3447 - RNA, 10 nt, synthetic construct
  source 1..10: mol_type = other RNA
  misc_feature 1..10: note = Description of sequence: Splice site sequence
ccggtaaagg

SEQ ID NO: 3448 - RNA, 10 nt, synthetic construct
  source 1..10: mol_type = other RNA
  misc_feature 1..10: note = Description of sequence: Splice site sequence
aaagttaatg

SEQ ID NO: 3449 - RNA, 10 nt, synthetic construct
  source 1..10: mol_type = other RNA
  misc_feature 1..10: note = Description of sequence: Splice site sequence
accgtaatta

SEQ ID NO: 3450 - RNA, 10 nt, synthetic construct
  source 1..10: mol_type = other RNA
  misc_feature 1..10: note = Description of sequence: Splice site sequence
ccggtaacgc

SEQ ID NO: 3451 - RNA, 10 nt, synthetic construct
  source 1..10: mol_type = other RNA
  misc_feature 1..10: note = Description of sequence: Splice site sequence
atggtaatta

SEQ ID NO: 3452 - RNA, 10 nt, synthetic construct
  source 1..10: mol_type = other RNA
  misc_feature 1..10: note = Description of sequence: Splice site sequence
aaggtgactc

SEQ ID NO: 3453 - RNA, 10 nt, synthetic construct
  source 1..10: mol_type = other RNA
  misc_feature 1..10: note = Description of sequence: Splice site sequence
agggtaaaaa

SEQ ID NO: 3454 - RNA, 10 nt, synthetic construct
  source 1..10: mol_type = other RNA
  misc_feature 1..10: note = Description of sequence: Splice site sequence
gaggtgtgac

SEQ ID NO: 3455 - RNA, 10 nt, synthetic construct
  source 1..10: mol_type = other RNA
  misc_feature 1..10: note = Description of sequence: Splice site sequence
cacgtaagct

SEQ ID NO: 3456 - RNA, 10 nt, synthetic construct
  source 1..10: mol_type = other RNA
  misc_feature 1..10: note = Description of sequence: Splice site sequence
caggtccccc

SEQ ID NO: 3457 - RNA, 10 nt, synthetic construct
  source 1..10: mol_type = other RNA
  misc_feature 1..10: note = Description of sequence: Splice site sequence
caggtcaggt

SEQ ID NO: 3458 - RNA, 10 nt, synthetic construct
  source 1..10: mol_type = other RNA
  misc_feature 1..10: note = Description of sequence: Splice site sequence
cgggtaagtc

SEQ ID NO: 3459 - RNA, 10 nt, synthetic construct
  source 1..10: mol_type = other RNA
  misc_feature 1..10: note = Description of sequence: Splice site sequence
acggtatggg

SEQ ID NO: 3460 - RNA, 10 nt, synthetic construct
  source 1..10: mol_type = other RNA
  misc_feature 1..10: note = Description of sequence: Splice site sequence
caagtaatat

SEQ ID NO: 3461 - RNA, 10 nt, synthetic construct
  source 1..10: mol_type = other RNA
  misc_feature 1..10: note = Description of sequence: Splice site sequence
caggttgggg

SEQ ID NO: 3462 - RNA, 10 nt, synthetic construct
  source 1..10: mol_type = other RNA
  misc_feature 1..10: note = Description of sequence: Splice site sequence
cctgtgctgg

SEQ ID NO: 3463 - RNA, 10 nt, synthetic construct
  source 1..10: mol_type = other RNA
  misc_feature 1..10: note = Description of sequence: Splice site sequence
agggtagagg

SEQ ID NO: 3464 - RNA, 10 nt, synthetic construct
  source 1..10: mol_type = other RNA
  misc_feature 1..10: note = Description of sequence: Splice site sequence
agggtagggc

SEQ ID NO: 3465 - RNA, 10 nt, synthetic construct
  source 1..10: mol_type = other RNA
  misc_feature 1..10: note = Description of sequence: Splice site sequence
gtggtgagta

SEQ ID NO: 3466 - RNA, 10 nt, synthetic construct
  source 1..10: mol_type = other RNA
  misc_feature 1..10: note = Description of sequence: Splice site sequence
aatgtatatc

SEQ ID NO: 3467 - RNA, 10 nt, synthetic construct
  source 1..10: mol_type = other RNA
  misc_feature 1..10: note = Description of sequence: Splice site sequence
agggtgaggc

SEQ ID NO: 3468 - RNA, 10 nt, synthetic construct
  source 1..10: mol_type = other RNA
  misc_feature 1..10: note = Description of sequence: Splice site sequence
ggggtgtgct

SEQ ID NO: 3469 - RNA, 10 nt, synthetic construct
  source 1..10: mol_type = other RNA
  misc_feature 1..10: note = Description of sequence: Splice site sequence
aatgtaacct

SEQ ID NO: 3470 - RNA, 10 nt, synthetic construct
  source 1..10: mol_type = other RNA
  misc_feature 1..10: note = Description of sequence: Splice site sequence
caggtgcact

SEQ ID NO: 3471 - RNA, 10 nt, synthetic construct
  source 1..10: mol_type = other RNA
  misc_feature 1..10: note = Description of sequence: Splice site sequence
gaggtatcct

SEQ ID NO: 3472 - RNA, 10 nt, synthetic construct
  source 1..10: mol_type = other RNA
  misc_feature 1..10: note = Description of sequence: Splice site sequence
tgtgtaagtg

SEQ ID NO: 3473 - RNA, 10 nt, synthetic construct
  source 1..10: mol_type = other RNA
  misc_feature 1..10: note = Description of sequence: Splice site sequence
ccagcaaggc

SEQ ID NO: 3474 - RNA, 10 nt, synthetic construct
  source 1..10: mol_type = other RNA
  misc_feature 1..10: note = Description of sequence: Splice site sequence
aatgtggggt

SEQ ID NO: 3475 - RNA, 10 nt, synthetic construct
  source 1..10: mol_type = other RNA
  misc_feature 1..10: note = Description of sequence: Splice site sequence
tcggtgcgtg

SEQ ID NO: 3476 - RNA, 10 nt, synthetic construct
  source 1..10: mol_type = other RNA
  misc_feature 1..10: note = Description of sequence: Splice site sequence
ttggtaaggc

SEQ ID NO: 3477 - RNA, 10 nt, synthetic construct
  source 1..10: mol_type = other RNA
  misc_feature 1..10: note = Description of sequence: Splice site sequence
gaggtaagtg

SEQ ID NO: 3478 - RNA, 10 nt, synthetic construct
  source 1..10: mol_type = other RNA
  misc_feature 1..10: note = Description of sequence: Splice site sequence
taggtctttt

SEQ ID NO: 3479 - RNA, 10 nt, synthetic construct
  source 1..10: mol_type = other RNA
  misc_feature 1..10: note = Description of sequence: Splice site sequence
gaggtctgat

SEQ ID NO: 3480 - RNA, 10 nt, synthetic construct
  source 1..10: mol_type = other RNA
  misc_feature 1..10: note = Description of sequence: Splice site sequence
ccagttagag

SEQ ID NO: 3481 - RNA, 10 nt, synthetic construct
  source 1..10: mol_type = other RNA
  misc_feature 1..10: note = Description of sequence: Splice site sequence
tgggtgaaaa

SEQ ID NO: 3482 - RNA, 10 nt, synthetic construct
  source 1..10: mol_type = other RNA
  misc_feature 1..10: note = Description of sequence: Splice site sequence
caggccggtc

SEQ ID NO: 3483 - RNA, 10 nt, synthetic construct
  source 1..10: mol_type = other RNA
  misc_feature 1..10: note = Description of sequence: Splice site sequence
ccggtaagag

SEQ ID NO: 3484 - RNA, 10 nt, synthetic construct
  source 1..10: mol_type = other RNA
  misc_feature 1..10: note = Description of sequence: Splice site sequence
ctggtaagac

SEQ ID NO: 3485 - RNA, 10 nt, synthetic construct
  source 1..10: mol_type = other RNA
  misc_feature 1..10: note = Description of sequence: Splice site sequence
ctggtttgtt

SEQ ID NO: 3486 - RNA, 10 nt, synthetic construct
  source 1..10: mol_type = other RNA
  misc_feature 1..10: note = Description of sequence: Splice site sequence
tgggtaggta

SEQ ID NO: 3487 - RNA, 10 nt, synthetic construct
  source 1..10: mol_type = other RNA
  misc_feature 1..10: note = Description of sequence: Splice site sequence
caggtgttcg

SEQ ID NO: 3488 - RNA, 10 nt, synthetic construct
  source 1..10: mol_type = other RNA
  misc_feature 1..10: note = Description of sequence: Splice site sequence
cgggtaggtc

SEQ ID NO: 3489 - RNA, 10 nt, synthetic construct
  source 1..10: mol_type = other RNA
  misc_feature 1..10: note = Description of sequence: Splice site sequence
gtggtacata

SEQ ID NO: 3490 - RNA, 10 nt, synthetic construct
  source 1..10: mol_type = other RNA
  misc_feature 1..10: note = Description of sequence: Splice site sequence
gatgtgagta

SEQ ID NO: 3491 - RNA, 10 nt, synthetic construct
  source 1..10: mol_type = other RNA
  misc_feature 1..10: note = Description of sequence: Splice site sequence
gaggtagccg

SEQ ID NO: 3492 - RNA, 10 nt, synthetic construct
  source 1..10: mol_type = other RNA
  misc_feature 1..10: note = Description of sequence: Splice site sequence
taggtgatct

SEQ ID NO: 3493 - RNA, 10 nt, synthetic construct
  source 1..10: mol_type = other RNA
  misc_feature 1..10: note = Description of sequence: Splice site sequence
cttgtcagtc

SEQ ID NO: 3494 - RNA, 10 nt, synthetic construct
  source 1..10: mol_type = other RNA
  misc_feature 1..10: note = Description of sequence: Splice site sequence
gaggtatcac

SEQ ID NO: 3495 - RNA, 10 nt, synthetic construct
  source 1..10: mol_type = other RNA
  misc_feature 1..10: note = Description of sequence: Splice site sequence
gaggtaatga

SEQ ID NO: 3496 - RNA, 10 nt, synthetic construct
  source 1..10: mol_type = other RNA
  misc_feature 1..10: note = Description of sequence: Splice site sequence
aaggtaacac

SEQ ID NO: 3497 - RNA, 10 nt, synthetic construct
  source 1..10: mol_type = other RNA
  misc_feature 1..10: note = Description of sequence: Splice site sequence
aaggcaagta

SEQ ID NO: 3498 - RNA, 10 nt, synthetic construct
  source 1..10: mol_type = other RNA
  misc_feature 1..10: note = Description of sequence: Splice site sequence
cgcgtgagcc

SEQ ID NO: 3499 - RNA, 10 nt, synthetic construct
  source 1..10: mol_type = other RNA
  misc_feature 1..10: note = Description of sequence: Splice site sequence
agtgtgcgtt

SEQ ID NO: 3500 - RNA, 10 nt, synthetic construct
  source 1..10: mol_type = other RNA
  misc_feature 1..10: note = Description of sequence: Splice site sequence
ggagcagttg

SEQ ID NO: 3501 - RNA, 10 nt, synthetic construct
  source 1..10: mol_type = other RNA
  misc_feature 1..10: note = Description of sequence: Splice site sequence
agcgtaagat

SEQ ID NO: 3502 - RNA, 10 nt, synthetic construct
  source 1..10: mol_type = other RNA
  misc_feature 1..10: note = Description of sequence: Splice site sequence
gaggtattca

SEQ ID NO: 3503 - RNA, 10 nt, synthetic construct
  source 1..10: mol_type = other RNA
  misc_feature 1..10: note = Description of sequence: Splice site sequence
aatgtaaagt

SEQ ID NO: 3504 - RNA, 10 nt, synthetic construct
  source 1..10: mol_type = other RNA
  misc_feature 1..10: note = Description of sequence: Splice site sequence
caggtaacaa

SEQ ID NO: 3505 - RNA, 10 nt, synthetic construct
  source 1..10: mol_type = other RNA
  misc_feature 1..10: note = Description of sequence: Splice site sequence
tcggtaggtg

SEQ ID NO: 3506 - RNA, 10 nt, synthetic construct
  source 1..10: mol_type = other RNA
  misc_feature 1..10: note = Description of sequence: Splice site sequence
cgggtgcagt

SEQ ID NO: 3507 - RNA, 10 nt, synthetic construct
  source 1..10: mol_type = other RNA
  misc_feature 1..10: note = Description of sequence: Splice site sequence
ggtgtgtgca

SEQ ID NO: 3508 - RNA, 10 nt, synthetic construct
  source 1..10: mol_type = other RNA
  misc_feature 1..10: note = Description of sequence: Splice site sequence
cacgtgtaag

SEQ ID NO: 3509 - RNA, 10 nt, synthetic construct
  source 1..10: mol_type = other RNA
  misc_feature 1..10: note = Description of sequence: Splice site sequence
gtggttggta

SEQ ID NO: 3510 - RNA, 10 nt, synthetic construct
  source 1..10: mol_type = other RNA
  misc_feature 1..10: note = Description of sequence: Splice site sequence
gcagccttga

SEQ ID NO: 3511 - RNA, 10 nt, synthetic construct
  source 1..10: mol_type = other RNA
  misc_feature 1..10: note = Description of sequence: Splice site sequence
cgagtgtgat

SEQ ID NO: 3512 - RNA, 10 nt, synthetic construct
  source 1..10: mol_type = other RNA
  misc_feature 1..10: note = Description of sequence: Splice site sequence
caggtatata

SEQ ID NO: 3513 - RNA, 10 nt, synthetic construct
  source 1..10: mol_type = other RNA
  misc_feature 1..10: note = Description of sequence: Splice site sequence
cccgtggtca

SEQ ID NO: 3514 - RNA, 10 nt, synthetic construct
  source 1..10: mol_type = other RNA
  misc_feature 1..10: note = Description of sequence: Splice site sequence
agtgtatcct

SEQ ID NO: 3515 - RNA, 10 nt, synthetic construct
  source 1..10: mol_type = other RNA
  misc_feature 1..10: note = Description of sequence: Splice site sequence
tgagtgtgtc

SEQ ID NO: 3516 - RNA, 10 nt, synthetic construct
  source 1..10: mol_type = other RNA
  misc_feature 1..10: note = Description of sequence: Splice site sequence
tgggtaatct

SEQ ID NO: 3517 - RNA, 10 nt, synthetic construct
  source 1..10: mol_type = other RNA
  misc_feature 1..10: note = Description of sequence: Splice site sequence
atggcaggtt

SEQ ID NO: 3518 - RNA, 10 nt, synthetic construct
  source 1..10: mol_type = other RNA
  misc_feature 1..10: note = Description of sequence: Splice site sequence
tcagcagcgt

SEQ ID NO: 3519 - RNA, 10 nt, synthetic construct
  source 1..10: mol_type = other RNA
  misc_feature 1..10: note = Description of sequence: Splice site sequence
cgggtgcgct

SEQ ID NO: 3520 - RNA, 10 nt, synthetic construct
  source 1..10: mol_type = other RNA
  misc_feature 1..10: note = Description of sequence: Splice site sequence
agcgtggtaa

SEQ ID NO: 3521 - RNA, 10 nt, synthetic construct
  source 1..10: mol_type = other RNA
  misc_feature 1..10: note = Description of sequence: Splice site sequence
aatgtgaatg

SEQ ID NO: 3522 - RNA, 10 nt, synthetic construct
  source 1..10: mol_type = other RNA
  misc_feature 1..10: note = Description of sequence: Splice site sequence
tcggtgagac

SEQ ID NO: 3523 - RNA, 10 nt, synthetic construct
  source 1..10: mol_type = other RNA
  misc_feature 1..10: note = Description of sequence: Splice site sequence
taggtaaagc

SEQ ID NO: 3524 - RNA, 10 nt, synthetic construct
  source 1..10: mol_type = other RNA
  misc_feature 1..10: note = Description of sequence: Splice site sequence
ctggtaaaag

SEQ ID NO: 3525 - RNA, 10 nt, synthetic construct
  source 1..10: mol_type = other RNA
  misc_feature 1..10: note = Description of sequence: Splice site sequence
ccggtgcgga

SEQ ID NO: 3526 - RNA, 10 nt, synthetic construct
  source 1..10: mol_type = other RNA
  misc_feature 1..10: note = Description of sequence: Splice site sequence
caggtactca

SEQ ID NO: 3527 - RNA, 10 nt, synthetic construct
  source 1..10: mol_type = other RNA
  misc_feature 1..10: note = Description of sequence: Splice site sequence
gaagttgagt

SEQ ID NO: 3528 - RNA, 10 nt, synthetic construct
  source 1..10: mol_type = other RNA
  misc_feature 1..10: note = Description of sequence: Splice site sequence
taggtatgct

SEQ ID NO: 3529 - RNA, 10 nt, synthetic construct
  source 1..10: mol_type = other RNA
  misc_feature 1..10: note = Description of sequence: Splice site sequence
cgtgtaagcc

SEQ ID NO: 3530 - RNA, 10 nt, synthetic construct
  source 1..10: mol_type = other RNA
  misc_feature 1..10: note = Description of sequence: Splice site sequence
tcggcaaggc

SEQ ID NO: 3531 - RNA, 10 nt, synthetic construct
  source 1..10: mol_type = other RNA
  misc_feature 1..10: note = Description of sequence: Splice site sequence
gaggttctcg

SEQ ID NO: 3532 - RNA, 10 nt, synthetic construct
  source 1..10: mol_type = other RNA
  misc_feature 1..10: note = Description of sequence: Splice site sequence
aaggcatgtg

SEQ ID NO: 3533 - RNA, 10 nt, synthetic construct
  source 1..10: mol_type = other RNA
  misc_feature 1..10: note = Description of sequence: Splice site sequence
taagtcattt

SEQ ID NO: 3534 - RNA, 10 nt, synthetic construct
  source 1..10: mol_type = other RNA
  misc_feature 1..10: note = Description of sequence: Splice site sequence
aatgtaaaga

SEQ ID NO: 3535 - RNA, 10 nt, synthetic construct
  source 1..10: mol_type = other RNA
  misc_feature 1..10: note = Description of sequence: Splice site sequence
taggtgctca

SEQ ID NO: 3536 - RNA, 10 nt, synthetic construct
  source 1..10: mol_type = other RNA
  misc_feature 1..10: note = Description of sequence: Splice site sequence
gaggtactga

SEQ ID NO: 3537 - RNA, 10 nt, synthetic construct
  source 1..10: mol_type = other RNA
  misc_feature 1..10: note = Description of sequence: Splice site sequence
tgggtaaaaa

SEQ ID NO: 3538 - RNA, 10 nt, synthetic construct
  source 1..10: mol_type = other RNA
  misc_feature 1..10: note = Description of sequence: Splice site sequence
tacgtgagtt

SEQ ID NO: 3539 - RNA, 10 nt, synthetic construct
  source 1..10: mol_type = other RNA
  misc_feature 1..10: note = Description of sequence: Splice site sequence
cgggtgagga

SEQ ID NO: 3540 - RNA, 10 nt, synthetic construct
  source 1..10: mol_type = other RNA
  misc_feature 1..10: note = Description of sequence: Splice site sequence
ggtgtaagct

SEQ ID NO: 3541 - RNA, 10 nt, synthetic construct
  source 1..10: mol_type = other RNA
  misc_feature 1..10: note = Description of sequence: Splice site sequence
ccagctaagt

SEQ ID NO: 3542 - RNA, 10 nt, synthetic construct
  source 1..10: mol_type = other RNA
  misc_feature 1..10: note = Description of sequence: Splice site sequence
gaggtacctc

SEQ ID NO: 3543 - RNA, 10 nt, synthetic construct
  source 1..10: mol_type = other RNA
  misc_feature 1..10: note = Description of sequence: Splice site sequence
gaggttagga

SEQ ID NO: 3544 - RNA, 10 nt, synthetic construct
  source 1..10: mol_type = other RNA
  misc_feature 1..10: note = Description of sequence: Splice site sequence
tgcgtgtgta

SEQ ID NO: 3545 - RNA, 10 nt, synthetic construct
  source 1..10: mol_type = other RNA
  misc_feature 1..10: note = Description of sequence: Splice site sequence
ccagtaacca

SEQ ID NO: 3546 - RNA, 10 nt, synthetic construct
  source 1..10: mol_type = other RNA
  misc_feature 1..10: note = Description of sequence: Splice site sequence
agggtctgtc

SEQ ID NO: 3547 - RNA, 10 nt, synthetic construct
  source 1..10: mol_type = other RNA
  misc_feature 1..10: note = Description of sequence: Splice site sequence
caggtaacct

SEQ ID NO: 3548 - RNA, 10 nt, synthetic construct
  source 1..10: mol_type = other RNA
  misc_feature 1..10: note = Description of sequence: Splice site sequence
taggttcgtg

SEQ ID NO: 3549 - RNA, 10 nt, synthetic construct
  source 1..10: mol_type = other RNA
  misc_feature 1..10: note = Description of sequence: Splice site sequence
aaagttagta

SEQ ID NO: 3550 - RNA, 10 nt, synthetic construct
  source 1..10: mol_type = other RNA
  misc_feature 1..10: note = Description of sequence: Splice site sequence
aaggcacagt

SEQ ID NO: 3551 - RNA, 10 nt, synthetic construct
  source 1..10: mol_type = other RNA
  misc_feature 1..10: note = Description of sequence: Splice site sequence
cttgcatggg

SEQ ID NO: 3552 - RNA, 10 nt, synthetic construct
  source 1..10: mol_type = other RNA
  misc_feature 1..10: note = Description of sequence: Splice site sequence
gcggtgagta

SEQ ID NO: 3553 - RNA, 10 nt, synthetic construct
  source 1..10: mol_type = other RNA
  misc_feature 1..10: note = Description of sequence: Splice site sequence
ggggtaagcg

SEQ ID NO: 3554 - RNA, 10 nt, synthetic construct
  source 1..10: mol_type = other RNA
  misc_feature 1..10: note = Description of sequence: Splice site sequence
gccgtaagaa

SEQ ID NO: 3555 - RNA, 10 nt, synthetic construct
  source 1..10: mol_type = other RNA
  misc_feature 1..10: note = Description of sequence: Splice site sequence
gaggtcggga

SEQ ID NO: 3556 - RNA, 10 nt, synthetic construct
  source 1..10: mol_type = other RNA
  misc_feature 1..10: note = Description of sequence: Splice site sequence
agtgtgagac

SEQ ID NO: 3557 - RNA, 10 nt, synthetic construct
  source 1..10: mol_type = other RNA
  misc_feature 1..10: note = Description of sequence: Splice site sequence
ccggtgggtc

SEQ ID NO: 3558 - RNA, 10 nt, synthetic construct
  source 1..10: mol_type = other RNA
  misc_feature 1..10: note = Description of sequence: Splice site sequence
tgggtaacgt

SEQ ID NO: 3559 - RNA, 10 nt, synthetic construct
  source 1..10: mol_type = other RNA
  misc_feature 1..10: note = Description of sequence: Splice site sequence
ttggtgagag

SEQ ID NO: 3560 - RNA, 10 nt, synthetic construct
  source 1..10: mol_type = other RNA
  misc_feature 1..10: note = Description of sequence: Splice site sequence
taggtaccct

SEQ ID NO: 3561 - RNA, 10 nt, synthetic construct
  source 1..10: mol_type = other RNA
  misc_feature 1..10: note = Description of sequence: Splice site sequence
ggggtgcgtc

SEQ ID NO: 3562 - RNA, 10 nt, synthetic construct
  source 1..10: mol_type = other RNA
  misc_feature 1..10: note = Description of sequence: Splice site sequence
aaggcaggag

SEQ ID NO: 3563 - RNA, 10 nt, synthetic construct
  source 1..10: mol_type = other RNA
  misc_feature 1..10: note = Description of sequence: Splice site sequence
acggtacatt

SEQ ID NO: 3564 - RNA, 10 nt, synthetic construct
  source 1..10: mol_type = other RNA
  misc_feature 1..10: note = Description of sequence: Splice site sequence
atggtatact

SEQ ID NO: 3565 - RNA, 10 nt, synthetic construct
  source 1..10: mol_type = other RNA
  misc_feature 1..10: note = Description of sequence: Splice site sequence
acagtaacga

SEQ ID NO: 3566 - RNA, 10 nt, synthetic construct
  source 1..10: mol_type = other RNA
  misc_feature 1..10: note = Description of sequence: Splice site sequence
ctggtaccca

SEQ ID NO: 3567 - RNA, 10 nt, synthetic construct
  source 1..10: mol_type = other RNA
  misc_feature 1..10: note = Description of sequence: Splice site sequence
caggtaaccc

SEQ ID NO: 3568 - RNA, 10 nt, synthetic construct
  source 1..10: mol_type = other RNA
  misc_feature 1..10: note = Description of sequence: Splice site sequence
ggagtaagta

SEQ ID NO: 3569 - RNA, 10 nt, synthetic construct
  source 1..10: mol_type = other RNA
  misc_feature 1..10: note = Description of sequence: Splice site sequence
actgtatgtc

SEQ ID NO: 3570 - RNA, 10 nt, synthetic construct
  source 1..10: mol_type = other RNA
  misc_feature 1..10: note = Description of sequence: Splice site sequence
ctggtaatgt

SEQ ID NO: 3571 - RNA, 10 nt, synthetic construct
  source 1..10: mol_type = other RNA
  misc_feature 1..10: note = Description of sequence: Splice site sequence
agtgtcagtg

SEQ ID NO: 3572 - RNA, 10 nt, synthetic construct
  source 1..10: mol_type = other RNA
  misc_feature 1..10: note = Description of sequence: Splice site sequence
ggagtatgtg

SEQ ID NO: 3573 - RNA, 10 nt, synthetic construct
  source 1..10: mol_type = other RNA
  misc_feature 1..10: note = Description of sequence: Splice site sequence
cctgttgtga

SEQ ID NO: 3574 - RNA, 10 nt, synthetic construct
  source 1..10: mol_type = other RNA
  misc_feature 1..10: note = Description of sequence: Splice site sequence
caggtaagca

SEQ ID NO: 3575 - RNA, 10 nt, synthetic construct
  source 1..10: mol_type = other RNA
  misc_feature 1..10: note = Description of sequence: Splice site sequence
caggtcacag

SEQ ID NO: 3576 - RNA, 10 nt, synthetic construct
  source 1..10: mol_type = other RNA
  misc_feature 1..10: note = Description of sequence: Splice site sequence
taggtttgcg

SEQ ID NO: 3577 - RNA, 10 nt, synthetic construct
  source 1..10: mol_type = other RNA
  misc_feature 1..10: note = Description of sequence: Splice site sequence
acggttgtat

SEQ ID NO: 3578 - RNA, 10 nt, synthetic construct
  source 1..10: mol_type = other RNA
  misc_feature 1..10: note = Description of sequence: Splice site sequence
ggggttagtt

SEQ ID NO: 3579 - RNA, 10 nt, synthetic construct
  source 1..10: mol_type = other RNA
  misc_feature 1..10: note = Description of sequence: Splice site sequence
acggtaaggc

SEQ ID NO: 3580 - RNA, 10 nt, synthetic construct
  source 1..10: mol_type = other RNA
  misc_feature 1..10: note = Description of sequence: Splice site sequence
ggggtgagag

SEQ ID NO: 3581 - RNA, 10 nt, synthetic construct
  source 1..10: mol_type = other RNA
  misc_feature 1..10: note = Description of sequence: Splice site sequence
caggcaggcc

SEQ ID NO: 3582 - RNA, 10 nt, synthetic construct
  source 1..10: mol_type = other RNA
  misc_feature 1..10: note = Description of sequence: Splice site sequence
cacgtgcagg

SEQ ID NO: 3583 - RNA, 10 nt, synthetic construct
  source 1..10: mol_type = other RNA
  misc_feature 1..10: note = Description of sequence: Splice site sequence
gcggtataat

SEQ ID NO: 3584 - RNA, 10 nt, synthetic construct
  source 1..10: mol_type = other RNA
  misc_feature 1..10: note = Description of sequence: Splice site sequence
taggtaaagt

SEQ ID NO: 3585 - RNA, 10 nt, synthetic construct
  source 1..10: mol_type = other RNA
  misc_feature 1..10: note = Description of sequence: Splice site sequence
taggtggatt

SEQ ID NO: 3586 - RNA, 10 nt, synthetic construct
  source 1..10: mol_type = other RNA
  misc_feature 1..10: note = Description of sequence: Splice site sequence
gaggtctgga

SEQ ID NO: 3587 - RNA, 10 nt, synthetic construct
  source 1..10: mol_type = other RNA
  misc_feature 1..10: note = Description of sequence: Splice site sequence
tcggtcagtt

SEQ ID NO: 3588 - RNA, 10 nt, synthetic construct
  source 1..10: mol_type = other RNA
  misc_feature 1..10: note = Description of sequence: Splice site sequence
tgggtaactg

SEQ ID NO: 3589 - RNA, 10 nt, synthetic construct
  source 1..10: mol_type = other RNA
  misc_feature 1..10: note = Description of sequence: Splice site sequence
aaggtttgat

SEQ ID NO: 3590 - RNA, 10 nt, synthetic construct
  source 1..10: mol_type = other RNA
  misc_feature 1..10: note = Description of sequence: Splice site sequence
tgtgctggtg

SEQ ID NO: 3591 - RNA, 10 nt, synthetic construct
  source 1..10: mol_type = other RNA
  misc_feature 1..10: note = Description of sequence: Splice site sequence
tgtgtacctc

SEQ ID NO: 3592 - RNA, 10 nt, synthetic construct
  source 1..10: mol_type = other RNA
  misc_feature 1..10: note = Description of sequence: Splice site sequence
atcgtcagcg

SEQ ID NO: 3593 - RNA, 10 nt, synthetic construct
  source 1..10: mol_type = other RNA
  misc_feature 1..10: note = Description of sequence: Splice site sequence
caggtcttgg

SEQ ID NO: 3594 - RNA, 10 nt, synthetic construct
  source 1..10: mol_type = other RNA
  misc_feature 1..10: note = Description of sequence: Splice site sequence
gaagttggta

SEQ ID NO: 3595 - RNA, 10 nt, synthetic construct
  source 1..10: mol_type = other RNA
  misc_feature 1..10: note = Description of sequence: Splice site sequence
gaagtaaaga

SEQ ID NO: 3596 - RNA, 10 nt, synthetic construct
  source 1..10: mol_type = other RNA
  misc_feature 1..10: note = Description of sequence: Splice site sequence
agggtatcat

SEQ ID NO: 3597 - RNA, 10 nt, synthetic construct
  source 1..10: mol_type = other RNA
  misc_feature 1..10: note = Description of sequence: Splice site sequence
tgggttgttt

SEQ ID NO: 3598 - RNA, 10 nt, synthetic construct
  source 1..10: mol_type = other RNA
  misc_feature 1..10: note = Description of sequence: Splice site sequence
agcgtgagat

SEQ ID NO: 3599 - RNA, 10 nt, synthetic construct
  source 1..10: mol_type = other RNA
  misc_feature 1..10: note = Description of sequence: Splice site sequence
agggtagatg

SEQ ID NO: 3600 - RNA, 10 nt, synthetic construct
  source 1..10: mol_type = other RNA
  misc_feature 1..10: note = Description of sequence: Splice site sequence
atcgcgtgag

SEQ ID NO: 3601 - RNA, 10 nt, synthetic construct
  source 1..10: mol_type = other RNA
  misc_feature 1..10: note = Description of sequence: Splice site sequence
agggtaagcc

SEQ ID NO: 3602 - RNA, 10 nt, synthetic construct
  source 1..10: mol_type = other RNA
  misc_feature 1..10: note = Description of sequence: Splice site sequence
agggtagcag

SEQ ID NO: 3603 - RNA, 10 nt, synthetic construct
  source 1..10: mol_type = other RNA
  misc_feature 1..10: note = Description of sequence: Splice site sequence
ttcgtttccg

SEQ ID NO: 3604 - RNA, 10 nt, synthetic construct
  source 1..10: mol_type = other RNA
  misc_feature 1..10: note = Description of sequence: Splice site sequence
caggtatggc

SEQ ID NO: 3605 - RNA, 10 nt, synthetic construct
  source 1..10: mol_type = other RNA
  misc_feature 1..10: note = Description of sequence: Splice site sequence
aaggtagaga

SEQ ID NO: 3606 - RNA, 10 nt, synthetic construct
  source 1..10: mol_type = other RNA
  misc_feature 1..10: note = Description of sequence: Splice site sequence
acggtaataa

SEQ ID NO: 3607 - RNA, 10 nt, synthetic construct
  source 1..10: mol_type = other RNA
  misc_feature 1..10: note = Description of sequence: Splice site sequence
ctggtacggt

SEQ ID NO: 3608 - RNA, 10 nt, synthetic construct
  source 1..10: mol_type = other RNA
  misc_feature 1..10: note = Description of sequence: Splice site sequence
gaggtcacag

SEQ ID NO: 3609 - RNA, 10 nt, synthetic construct
  source 1..10: mol_type = other RNA
  misc_feature 1..10: note = Description of sequence: Splice site sequence
ctggtacgcc

SEQ ID NO: 3610 - RNA, 10 nt, synthetic construct
  source 1..10: mol_type = other RNA
  misc_feature 1..10: note = Description of sequence: Splice site sequence
ccggtaaccg

SEQ ID NO: 3611 - RNA, 10 nt, synthetic construct
  source 1..10: mol_type = other RNA
  misc_feature 1..10: note = Description of sequence: Splice site sequence
cttgtaagtc

SEQ ID NO: 3612 - RNA, 10 nt, synthetic construct
  source 1..10: mol_type = other RNA
  misc_feature 1..10: note = Description of sequence: Splice site sequence
accgtatgta

SEQ ID NO: 3613 - RNA, 10 nt, synthetic construct
  source 1..10: mol_type = other RNA
  misc_feature 1..10: note = Description of sequence: Splice site sequence
cgggtacttt

SEQ ID NO: 3614 - RNA, 10 nt, synthetic construct
  source 1..10: mol_type = other RNA
  misc_feature 1..10: note = Description of sequence: Splice site sequence
aaggtatgcg

SEQ ID NO: 3615 - RNA, 10 nt, synthetic construct
  source 1..10: mol_type = other RNA
  misc_feature 1..10: note = Description of sequence: Splice site sequence
cctgtaggct

SEQ ID NO: 3616 - RNA, 10 nt, synthetic construct
  source 1..10: mol_type = other RNA
  misc_feature 1..10: note = Description of sequence: Splice site sequence
acagtagaaa

SEQ ID NO: 3617 - RNA, 10 nt, synthetic construct
  source 1..10: mol_type = other RNA
  misc_feature 1..10: note = Description of sequence: Splice site sequence
ccggttagta

SEQ ID NO: 3618 - RNA, 10 nt, synthetic construct
  source 1..10: mol_type = other RNA
  misc_feature 1..10: note = Description of sequence: Splice site sequence
cgggtaggcg

SEQ ID NO: 3619 - RNA, 10 nt, synthetic construct
  source 1..10: mol_type = other RNA
  misc_feature 1..10: note = Description of sequence: Splice site sequence
gaggtgagtc

SEQ ID NO: 3620 - RNA, 10 nt, synthetic construct
  source 1..10: mol_type = other RNA
  misc_feature 1..10: note = Description of sequence: Splice site sequence
ctggtagcct

SEQ ID NO: 3621 - RNA, 10 nt, synthetic construct
  source 1..10: mol_type = other RNA
  misc_feature 1..10: note = Description of sequence: Splice site sequence
gaagtaactt

SEQ ID NO: 3622 - RNA, 10 nt, synthetic construct
  source 1..10: mol_type = other RNA
  misc_feature 1..10: note = Description of sequence: Splice site sequence
gaagtaagat

SEQ ID NO: 3623 - RNA, 10 nt, synthetic construct
  source 1..10: mol_type = other RNA
  misc_feature 1..10: note = Description of sequence: Splice site sequence
gtagttctat

SEQ ID NO: 3624 - RNA, 10 nt, synthetic construct
  source 1..10: mol_type = other RNA
  misc_feature 1..10: note = Description of sequence: Splice site sequence
gaggtacatg

SEQ ID NO: 3625 - RNA, 10 nt, synthetic construct
  source 1..10: mol_type = other RNA
  misc_feature 1..10: note = Description of sequence: Splice site sequence
tgggtaaggc

SEQ ID NO: 3626 - RNA, 10 nt, synthetic construct
  source 1..10: mol_type = other RNA
  misc_feature 1..10: note = Description of sequence: Splice site sequence
ccagttacgc

SEQ ID NO: 3627 - RNA, 10 nt, synthetic construct
  source 1..10: mol_type = other RNA
  misc_feature 1..10: note = Description of sequence: Splice site sequence
actgtggtga

SEQ ID NO: 3628 - RNA, 10 nt, synthetic construct
  source 1..10: mol_type = other RNA
  misc_feature 1..10: note = Description of sequence: Splice site sequence
attgtaggtg

SEQ ID NO: 3629 - RNA, 10 nt, synthetic construct
  source 1..10: mol_type = other RNA
  misc_feature 1..10: note = Description of sequence: Splice site sequence
accgtcagtg

SEQ ID NO: 3630 - RNA, 10 nt, synthetic construct
  source 1..10: mol_type = other RNA
  misc_feature 1..10: note = Description of sequence: Splice site sequence
aatgtgaggg

SEQ ID NO: 3631 - RNA, 10 nt, synthetic construct
  source 1..10: mol_type = other RNA
  misc_feature 1..10: note = Description of sequence: Splice site sequence
tgggtgtggt

SEQ ID NO: 3632 - RNA, 10 nt, synthetic construct
  source 1..10: mol_type = other RNA
  misc_feature 1..10: note = Description of sequence: Splice site sequence
tccgtgagtg

SEQ ID NO: 3633 - RNA, 10 nt, synthetic construct
  source 1..10: mol_type = other RNA
  misc_feature 1..10: note = Description of sequence: Splice site sequence
caggcaagct

SEQ ID NO: 3634 - RNA, 10 nt, synthetic construct
  source 1..10: mol_type = other RNA
  misc_feature 1..10: note = Description of sequence: Splice site sequence
aaagtagcag

SEQ ID NO: 3635 - RNA, 10 nt, synthetic construct
  source 1..10: mol_type = other RNA
  misc_feature 1..10: note = Description of sequence: Splice site sequence
cttgtcagtg

SEQ ID NO: 3636 - RNA, 10 nt, synthetic construct
  source 1..10: mol_type = other RNA
  misc_feature 1..10: note = Description of sequence: Splice site sequence
taggtgcgct

SEQ ID NO: 3637 - RNA, 10 nt, synthetic construct
  source 1..10: mol_type = other RNA
  misc_feature 1..10: note = Description of sequence: Splice site sequence
gaggcaaatt

SEQ ID NO: 3638 - RNA, 10 nt, synthetic construct
  source 1..10: mol_type = other RNA
  misc_feature 1..10: note = Description of sequence: Splice site sequence
agggtacctc

SEQ ID NO: 3639 - RNA, 10 nt, synthetic construct
  source 1..10: mol_type = other RNA
  misc_feature 1..10: note = Description of sequence: Splice site sequence
caagtgcgta

SEQ ID NO: 3640 - RNA, 10 nt, synthetic construct
  source 1..10: mol_type = other RNA
  misc_feature 1..10: note = Description of sequence: Splice site sequence
gtggtaaata

SEQ ID NO: 3641 - RNA, 10 nt, synthetic construct
  source 1..10: mol_type = other RNA
  misc_feature 1..10: note = Description of sequence: Splice site sequence
gatgtaagcg

SEQ ID NO: 3642 - RNA, 10 nt, synthetic construct
  source 1..10: mol_type = other RNA
  misc_feature 1..10: note = Description of sequence: Splice site sequence
cctgtacggc

SEQ ID NO: 3643 - RNA, 10 nt, synthetic construct
  source 1..10: mol_type = other RNA
  misc_feature 1..10: note = Description of sequence: Splice site sequence
taggtccata

SEQ ID NO: 3644 - RNA, 10 nt, synthetic construct
  source 1..10: mol_type = other RNA
  misc_feature 1..10: note = Description of sequence: Splice site sequence
aaagtactga

SEQ ID NO: 3645 - RNA, 10 nt, synthetic construct
  source 1..10: mol_type = other RNA
  misc_feature 1..10: note = Description of sequence: Splice site sequence
ttggtaagcg

SEQ ID NO: 3646 - RNA, 10 nt, synthetic construct
  source 1..10: mol_type = other RNA
  misc_feature 1..10: note = Description of sequence: Splice site sequence
caggcaagcg

SEQ ID NO: 3647 - RNA, 10 nt, synthetic construct
  source 1..10: mol_type = other RNA
  misc_feature 1..10: note = Description of sequence: Splice site sequence
tttgcaggtt

SEQ ID NO: 3648 - RNA, 10 nt, synthetic construct
  source 1..10: mol_type = other RNA
  misc_feature 1..10: note = Description of sequence: Splice site sequence
caggtttata

SEQ ID NO: 3649 - RNA, 10 nt, synthetic construct
  source 1..10: mol_type = other RNA
  misc_feature 1..10: note = Description of sequence: Splice site sequence
gtagtaagtt

SEQ ID NO: 3650 - RNA, 10 nt, synthetic construct
  source 1..10: mol_type = other RNA
  misc_feature 1..10: note = Description of sequence: Splice site sequence
caggtaatac

SEQ ID NO: 3651 - RNA, 10 nt, synthetic construct
  source 1..10: mol_type = other RNA
  misc_feature 1..10: note = Description of sequence: Splice site sequence
caggcaaggc

SEQ ID NO: 3652 - RNA, 10 nt, synthetic construct
  source 1..10: mol_type = other RNA
  misc_feature 1..10: note = Description of sequence: Splice site sequence
tttgtccgtg

SEQ ID NO: 3653 - RNA, 10 nt, synthetic construct
  source 1..10: mol_type = other RNA
  misc_feature 1..10: note = Description of sequence: Splice site sequence
accgtgagtg

SEQ ID NO: 3654 - RNA, 10 nt, synthetic construct
  source 1..10: mol_type = other RNA
  misc_feature 1..10: note = Description of sequence: Splice site sequence
caagtaagct

SEQ ID NO: 3655 - RNA, 10 nt, synthetic construct
  source 1..10: mol_type = other RNA
  misc_feature 1..10: note = Description of sequence: Splice site sequence
caggtaaagg

SEQ ID NO: 3656 - RNA, 10 nt, synthetic construct
  source 1..10: mol_type = other RNA
  misc_feature 1..10: note = Description of sequence: Splice site sequence
aaggcaagcg

SEQ ID NO: 3657 - RNA, 10 nt, synthetic construct
  source 1..10: mol_type = other RNA
  misc_feature 1..10: note = Description of sequence: Splice site sequence
agtgtacgtg

SEQ ID NO: 3658 - RNA, 10 nt, synthetic construct
  source 1..10: mol_type = other RNA
  misc_feature 1..10: note = Description of sequence: Splice site sequence
agggtgcgta

SEQ ID NO: 3659 - RNA, 10 nt, synthetic construct
  source 1..10: mol_type = other RNA
  misc_feature 1..10: note = Description of sequence: Splice site sequence
cgagttatga

SEQ ID NO: 3660 - RNA, 10 nt, synthetic construct
  source 1..10: mol_type = other RNA
  misc_feature 1..10: note = Description of sequence: Splice site sequence
ttggtgaaga

SEQ ID NO: 3661 - RNA, 10 nt, synthetic construct
  source 1..10: mol_type = other RNA
  misc_feature 1..10: note = Description of sequence: Splice site sequence
agggtaatgg

SEQ ID NO: 3662 - RNA, 10 nt, synthetic construct
  source 1..10: mol_type = other RNA
  misc_feature 1..10: note = Description of sequence: Splice site sequence
caggtaacgc

SEQ ID NO: 3663 - RNA, 10 nt, synthetic construct
  source 1..10: mol_type = other RNA
  misc_feature 1..10: note = Description of sequence: Splice site sequence
ctggtacact

SEQ ID NO: 3664 - RNA, 10 nt, synthetic construct
  source 1..10: mol_type = other RNA
  misc_feature 1..10: note = Description of sequence: Splice site sequence
caggtacttg

SEQ ID NO: 3665 - RNA, 10 nt, synthetic construct
  source 1..10: mol_type = other RNA
  misc_feature 1..10: note = Description of sequence: Splice site sequence
cacgtaagta

SEQ ID NO: 3666 - RNA, 10 nt, synthetic construct
  source 1..10: mol_type = other RNA
  misc_feature 1..10: note = Description of sequence: Splice site sequence
gtggtgcggc

SEQ ID NO: 3667 - RNA, 10 nt, synthetic construct
  source 1..10: mol_type = other RNA
  misc_feature 1..10: note = Description of sequence: Splice site sequence
gaggtcagtt

SEQ ID NO: 3668 - RNA, 10 nt, synthetic construct
  source 1..10: mol_type = other RNA
  misc_feature 1..10: note = Description of sequence: Splice site sequence
gttgtaggta

SEQ ID NO: 3669 - RNA, 10 nt, synthetic construct
  source 1..10: mol_type = other RNA
  misc_feature 1..10: note = Description of sequence: Splice site sequence
tgggtacaag

SEQ ID NO: 3670 - RNA, 10 nt, synthetic construct
  source 1..10: mol_type = other RNA
  misc_feature 1..10: note = Description of sequence: Splice site sequence
atggcaagta

SEQ ID NO: 3671 - RNA, 10 nt, synthetic construct
  source 1..10: mol_type = other RNA
  misc_feature 1..10: note = Description of sequence: Splice site sequence
gcggtgagag

SEQ ID NO: 3672 - RNA, 10 nt, synthetic construct
  source 1..10: mol_type = other RNA
  misc_feature 1..10: note = Description of sequence: Splice site sequence
aaggtgcttc

SEQ ID NO: 3673 - RNA, 10 nt, synthetic construct
  source 1..10: mol_type = other RNA
  misc_feature 1..10: note = Description of sequence: Splice site sequence
taggtacatc

SEQ ID NO: 3674 - RNA, 10 nt, synthetic construct
  source 1..10: mol_type = other RNA
  misc_feature 1..10: note = Description of sequence: Splice site sequence
actgtggtaa

SEQ ID NO: 3675 - RNA, 10 nt, synthetic construct
  source 1..10: mol_type = other RNA
  misc_feature 1..10: note = Description of sequence: Splice site sequence
gaggtatgca

SEQ ID NO: 3676 - RNA, 10 nt, synthetic construct
  source 1..10: mol_type = other RNA
  misc_feature 1..10: note = Description of sequence: Splice site sequence
agggtagttc

SEQ ID NO: 3677 - RNA, 10 nt, synthetic construct
  source 1..10: mol_type = other RNA
  misc_feature 1..10: note = Description of sequence: Splice site sequence
caggttggga

SEQ ID NO: 3678 - RNA, 10 nt, synthetic construct
  source 1..10: mol_type = other RNA
  misc_feature 1..10: note = Description of sequence: Splice site sequence
caggtggata

SEQ ID NO: 3679 - RNA, 10 nt, synthetic construct
  source 1..10: mol_type = other RNA
  misc_feature 1..10: note = Description of sequence: Splice site sequence
gaggtaggat

SEQ ID NO: 3680 - RNA, 10 nt, synthetic construct
  source 1..10: mol_type = other RNA
  misc_feature 1..10: note = Description of sequence: Splice site sequence
ggggtttgtg

SEQ ID NO: 3681 - RNA, 10 nt, synthetic construct
  source 1..10: mol_type = other RNA
  misc_feature 1..10: note = Description of sequence: Splice site sequence
taggtaattg

SEQ ID NO: 3682 - RNA, 10 nt, synthetic construct
  source 1..10: mol_type = other RNA
  misc_feature 1..10: note = Description of sequence: Splice site sequence
acggtaagaa

SEQ ID NO: 3683 - RNA, 10 nt, synthetic construct
  source 1..10: mol_type = other RNA
  misc_feature 1..10: note = Description of sequence: Splice site sequence
tcggtacagg

SEQ ID NO: 3684 - RNA, 10 nt, synthetic construct
  source 1..10: mol_type = other RNA
  misc_feature 1..10: note = Description of sequence: Splice site sequence
caagtaagcg

SEQ ID NO: 3685 - RNA, 10 nt, synthetic construct
  source 1..10: mol_type = other RNA
  misc_feature 1..10: note = Description of sequence: Splice site sequence
aaggtccgcg

SEQ ID NO: 3686 - RNA, 10 nt, synthetic construct
  source 1..10: mol_type = other RNA
  misc_feature 1..10: note = Description of sequence: Splice site sequence
caggtgaatg

SEQ ID NO: 3687 - RNA, 10 nt, synthetic construct
  source 1..10: mol_type = other RNA
  misc_feature 1..10: note = Description of sequence: Splice site sequence
tctgtatgtc

SEQ ID NO: 3688 - RNA, 10 nt, synthetic construct
  source 1..10: mol_type = other RNA
  misc_feature 1..10: note = Description of sequence: Splice site sequence
tcggttagta

SEQ ID NO: 3689 - RNA, 10 nt, synthetic construct
  source 1..10: mol_type = other RNA
  misc_feature 1..10: note = Description of sequence: Splice site sequence
gatgtatgca

SEQ ID NO: 3690 - RNA, 10 nt, synthetic construct
  source 1..10: mol_type = other RNA
  misc_feature 1..10: note = Description of sequence: Splice site sequence
gaggttggtg

SEQ ID NO: 3691 - RNA, 10 nt, synthetic construct
  source 1..10: mol_type = other RNA
  misc_feature 1..10: note = Description of sequence: Splice site sequence
tgggtcagtc

SEQ ID NO: 3692 - RNA, 10 nt, synthetic construct
  source 1..10: mol_type = other RNA
  misc_feature 1..10: note = Description of sequence: Splice site sequence
caggttgctt

SEQ ID NO: 3693 - RNA, 10 nt, synthetic construct
  source 1..10: mol_type = other RNA
  misc_feature 1..10: note = Description of sequence: Splice site sequence
agggtagagt

SEQ ID NO: 3694 - RNA, 10 nt, synthetic construct
  source 1..10: mol_type = other RNA
  misc_feature 1..10: note = Description of sequence: Splice site sequence
cgcgtatgta

SEQ ID NO: 3695 - RNA, 10 nt, synthetic construct
  source 1..10: mol_type = other RNA
  misc_feature 1..10: note = Description of sequence: Splice site sequence
gaggtattaa

SEQ ID NO: 3696 - RNA, 10 nt, synthetic construct
  source 1..10: mol_type = other RNA
  misc_feature 1..10: note = Description of sequence: Splice site sequence
caggtaaact

SEQ ID NO: 3697 - RNA, 10 nt, synthetic construct
  source 1..10: mol_type = other RNA
  misc_feature 1..10: note = Description of sequence: Splice site sequence
ggggtctggc

SEQ ID NO: 3698 - RNA, 10 nt, synthetic construct
  source 1..10: mol_type = other RNA
  misc_feature 1..10: note = Description of sequence: Splice site sequence
gctgtggggt

SEQ ID NO: 3699 - RNA, 10 nt, synthetic construct
  source 1..10: mol_type = other RNA
  misc_feature 1..10: note = Description of sequence: Splice site sequence
ttggtaagtc

SEQ ID NO: 3700 - RNA, 10 nt, synthetic construct
  source 1..10: mol_type = other RNA
  misc_feature 1..10: note = Description of sequence: Splice site sequence
aaggtagaag

SEQ ID NO: 3701 - RNA, 10 nt, synthetic construct
  source 1..10: mol_type = other RNA
  misc_feature 1..10: note = Description of sequence: Splice site sequence
atggtgagga

SEQ ID NO: 3702 - RNA, 10 nt, synthetic construct
  source 1..10: mol_type = other RNA
  misc_feature 1..10: note = Description of sequence: Splice site sequence
ccggtacagc

SEQ ID NO: 3703 - RNA, 10 nt, synthetic construct
  source 1..10: mol_type = other RNA
  misc_feature 1..10: note = Description of sequence: Splice site sequence
gcggtgcgga

SEQ ID NO: 3704 - RNA, 10 nt, synthetic construct
  source 1..10: mol_type = other RNA
  misc_feature 1..10: note = Description of sequence: Splice site sequence
aacgtaggtt

SEQ ID NO: 3705 - RNA, 10 nt, synthetic construct
  source 1..10: mol_type = other RNA
  misc_feature 1..10: note = Description of sequence: Splice site sequence
ttggtactat

SEQ ID NO: 3706 - RNA, 10 nt, synthetic construct
  source 1..10: mol_type = other RNA
  misc_feature 1..10: note = Description of sequence: Splice site sequence
caggcatggg

SEQ ID NO: 3707 - RNA, 10 nt, synthetic construct
  source 1..10: mol_type = other RNA
  misc_feature 1..10: note = Description of sequence: Splice site sequence
caggtgggcg

SEQ ID NO: 3708 - RNA, 10 nt, synthetic construct
  source 1..10: mol_type = other RNA
  misc_feature 1..10: note = Description of sequence: Splice site sequence
cacgtgagga

SEQ ID NO: 3709 - RNA, 10 nt, synthetic construct
  source 1..10: mol_type = other RNA
  misc_feature 1..10: note = Description of sequence: Splice site sequence
tgggcattct

SEQ ID NO: 3710 - RNA, 10 nt, synthetic construct
  source 1..10: mol_type = other RNA
  misc_feature 1..10: note = Description of sequence: Splice site sequence
agagtacgta

SEQ ID NO: 3711 - RNA, 10 nt, synthetic construct
  source 1..10: mol_type = other RNA
  misc_feature 1..10: note = Description of sequence: Splice site sequence
aaggtattca

SEQ ID NO: 3712 - RNA, 10 nt, synthetic construct
  source 1..10: mol_type = other RNA
  misc_feature 1..10: note = Description of sequence: Splice site sequence
gaggtctaca

SEQ ID NO: 3713 - RNA, 10 nt, synthetic construct
  source 1..10: mol_type = other RNA
  misc_feature 1..10: note = Description of sequence: Splice site sequence
gttgtaggtc

SEQ ID NO: 3714 - RNA, 10 nt, synthetic construct
  source 1..10: mol_type = other RNA
  misc_feature 1..10: note = Description of sequence: Splice site sequence
caggtactcg

SEQ ID NO: 3715 - RNA, 10 nt, synthetic construct
  source 1..10: mol_type = other RNA
  misc_feature 1..10: note = Description of sequence: Splice site sequence
gtcgtatgtt

SEQ ID NO: 3716 - RNA, 10 nt, synthetic construct
  source 1..10: mol_type = other RNA
  misc_feature 1..10: note = Description of sequence: Splice site sequence
agtgttggta

SEQ ID NO: 3717 - RNA, 10 nt, synthetic construct
  source 1..10: mol_type = other RNA
  misc_feature 1..10: note = Description of sequence: Splice site sequence
aaggtagatt

SEQ ID NO: 3718 - RNA, 10 nt, synthetic construct
  source 1..10: mol_type = other RNA
  misc_feature 1..10: note = Description of sequence: Splice site sequence
gaggccccag

SEQ ID NO: 3719 - RNA, 10 nt, synthetic construct
  source 1..10: mol_type = other RNA
  misc_feature 1..10: note = Description of sequence: Splice site sequence
atggtcagtt

SEQ ID NO: 3720 - RNA, 10 nt, synthetic construct
  source 1..10: mol_type = other RNA
  misc_feature 1..10: note = Description of sequence: Splice site sequence
tctgtaagga

SEQ ID NO: 3721 - RNA, 10 nt, synthetic construct
  source 1..10: mol_type = other RNA
  misc_feature 1..10: note = Description of sequence: Splice site sequence
caggtcgggc

SEQ ID NO: 3722 - RNA, 10 nt, synthetic construct
  source 1..10: mol_type = other RNA
  misc_feature 1..10: note = Description of sequence: Splice site sequence
ctggtacttc

SEQ ID NO: 3723 - RNA, 10 nt, synthetic construct
  source 1..10: mol_type = other RNA
  misc_feature 1..10: note = Description of sequence: Splice site sequence
tgggtccgta

SEQ ID NO: 3724 - RNA, 10 nt, synthetic construct
  source 1..10: mol_type = other RNA
  misc_feature 1..10: note = Description of sequence: Splice site sequence
gaggttgtgc

SEQ ID NO: 3725 - RNA, 10 nt, synthetic construct
  source 1..10: mol_type = other RNA
  misc_feature 1..10: note = Description of sequence: Splice site sequence
aaagtatggc

SEQ ID NO: 3726 - RNA, 10 nt, synthetic construct
  source 1..10: mol_type = other RNA
  misc_feature 1..10: note = Description of sequence: Splice site sequence
ctggtacgga

SEQ ID NO: 3727 - RNA, 10 nt, synthetic construct
  source 1..10: mol_type = other RNA
  misc_feature 1..10: note = Description of sequence: Splice site sequence
caagtgacct

SEQ ID NO: 3728 - RNA, 10 nt, synthetic construct
  source 1..10: mol_type = other RNA
  misc_feature 1..10: note = Description of sequence: Splice site sequence
aaggtctgca

SEQ ID NO: 3729 - RNA, 10 nt, synthetic construct
  source 1..10: mol_type = other RNA
  misc_feature 1..10: note = Description of sequence: Splice site sequence
aaggtgacct

SEQ ID NO: 3730 - RNA, 10 nt, synthetic construct
  source 1..10: mol_type = other RNA
  misc_feature 1..10: note = Description of sequence: Splice site sequence
caggcaggtc

SEQ ID NO: 3731 - RNA, 10 nt, synthetic construct
  source 1..10: mol_type = other RNA
  misc_feature 1..10: note = Description of sequence: Splice site sequence
tcagcagtga

SEQ ID NO: 3732 - RNA, 10 nt, synthetic construct
  source 1..10: mol_type = other RNA
  misc_feature 1..10: note = Description of sequence: Splice site sequence
aaggtaccac

SEQ ID NO: 3733 - RNA, 10 nt, synthetic construct
  source 1..10: mol_type = other RNA
  misc_feature 1..10: note = Description of sequence: Splice site sequence
taagtaggtg

SEQ ID NO: 3734 - RNA, 10 nt, synthetic construct
  source 1..10: mol_type = other RNA
  misc_feature 1..10: note = Description of sequence: Splice site sequence
caggtgtcgg

SEQ ID NO: 3735 - RNA, 10 nt, synthetic construct
  source 1..10: mol_type = other RNA
  misc_feature 1..10: note = Description of sequence: Splice site sequence
caggtggcta

SEQ ID NO: 3736 - RNA, 10 nt, synthetic construct
  source 1..10: mol_type = other RNA
  misc_feature 1..10: note = Description of sequence: Splice site sequence
gaggttgcca

SEQ ID NO: 3737 - RNA, 10 nt, synthetic construct
  source 1..10: mol_type = other RNA
  misc_feature 1..10: note = Description of sequence: Splice site sequence
caggccgtgg

SEQ ID NO: 3738 - RNA, 10 nt, synthetic construct
  source 1..10: mol_type = other RNA
  misc_feature 1..10: note = Description of sequence: Splice site sequence
ttggtatatg

SEQ ID NO: 3739 - RNA, 10 nt, synthetic construct
  source 1..10: mol_type = other RNA
  misc_feature 1..10: note = Description of sequence: Splice site sequence
gaggttgagt

SEQ ID NO: 3740 - RNA, 10 nt, synthetic construct
  source 1..10: mol_type = other RNA
  misc_feature 1..10: note = Description of sequence: Splice site sequence
gaggtaggtc

SEQ ID NO: 3741 - RNA, 10 nt, synthetic construct
  source 1..10: mol_type = other RNA
  misc_feature 1..10: note = Description of sequence: Splice site sequence
taggtccttc

SEQ ID NO: 3742 - RNA, 10 nt, synthetic construct
  source 1..10: mol_type = other RNA
  misc_feature 1..10: note = Description of sequence: Splice site sequence
gaggcaagtc

SEQ ID NO: 3743 - RNA, 10 nt, synthetic construct
  source 1..10: mol_type = other RNA
  misc_feature 1..10: note = Description of sequence: Splice site sequence
gaggtaacat

SEQ ID NO: 3744 - RNA, 10 nt, synthetic construct
  source 1..10: mol_type = other RNA
  misc_feature 1..10: note = Description of sequence: Splice site sequence
tcggttggtt

SEQ ID NO: 3745 - RNA, 10 nt, synthetic construct
  source 1..10: mol_type = other RNA
  misc_feature 1..10: note = Description of sequence: Splice site sequence
caggtgaacc

SEQ ID NO: 3746 - RNA, 10 nt, synthetic construct
  source 1..10: mol_type = other RNA
  misc_feature 1..10: note = Description of sequence: Splice site sequence
caggtctttt

SEQ ID NO: 3747 - RNA, 10 nt, synthetic construct
  source 1..10: mol_type = other RNA
  misc_feature 1..10: note = Description of sequence: Splice site sequence
caggcatggc

SEQ ID NO: 3748 - RNA, 10 nt, synthetic construct
  source 1..10: mol_type = other RNA
  misc_feature 1..10: note = Description of sequence: Splice site sequence
ttggtaggtt

SEQ ID NO: 3749 - RNA, 10 nt, synthetic construct
  source 1..10: mol_type = other RNA
  misc_feature 1..10: note = Description of sequence: Splice site sequence
tatgtgagca

SEQ ID NO: 3750 - RNA, 10 nt, synthetic construct
  source 1..10: mol_type = other RNA
  misc_feature 1..10: note = Description of sequence: Splice site sequence
aatgtaataa

SEQ ID NO: 3751 - RNA, 10 nt, synthetic construct
  source 1..10: mol_type = other RNA
  misc_feature 1..10: note = Description of sequence: Splice site sequence
aaagtaaggc

SEQ ID NO: 3752 - RNA, 10 nt, synthetic construct
  source 1..10: mol_type = other RNA
  misc_feature 1..10: note = Description of sequence: Splice site sequence
gaggtaagtt

SEQ ID NO: 3753 - RNA, 10 nt, synthetic construct
  source 1..10: mol_type = other RNA
  misc_feature 1..10: note = Description of sequence: Splice site sequence
aaggtagccg

SEQ ID NO: 3754 - RNA, 10 nt, synthetic construct
  source 1..10: mol_type = other RNA
  misc_feature 1..10: note = Description of sequence: Splice site sequence
caggtggtgc

SEQ ID NO: 3755 - RNA, 10 nt, synthetic construct
  source 1..10: mol_type = other RNA
  misc_feature 1..10: note = Description of sequence: Splice site sequence
tgagtcagtt

SEQ ID NO: 3756 - RNA, 10 nt, synthetic construct
  source 1..10: mol_type = other RNA
  misc_feature 1..10: note = Description of sequence: Splice site sequence
ctggtaggcc

SEQ ID NO: 3757 - RNA, 10 nt, synthetic construct
  source 1..10: mol_type = other RNA
  misc_feature 1..10: note = Description of sequence: Splice site sequence
caagtaagga

SEQ ID NO: 3758 - RNA, 10 nt, synthetic construct
  source 1..10: mol_type = other RNA
  misc_feature 1..10: note = Description of sequence: Splice site sequence
cgggtaaggc

SEQ ID NO: 3759 - RNA, 10 nt, synthetic construct
  source 1..10: mol_type = other RNA
  misc_feature 1..10: note = Description of sequence: Splice site sequence
aaggcgagga

SEQ ID NO: 3760 - RNA, 10 nt, synthetic construct
  source 1..10: mol_type = other RNA
  misc_feature 1..10: note = Description of sequence: Splice site sequence
ccggtaatta

SEQ ID NO: 3761 - RNA, 10 nt, synthetic construct
  source 1..10: mol_type = other RNA
  misc_feature 1..10: note = Description of sequence: Splice site sequence
aaggtggtca

SEQ ID NO: 3762 - RNA, 10 nt, synthetic construct
  source 1..10: mol_type = other RNA
  misc_feature 1..10: note = Description of sequence: Splice site sequence
atcgtaagta

SEQ ID NO: 3763 - RNA, 10 nt, synthetic construct
  source 1..10: mol_type = other RNA
  misc_feature 1..10: note = Description of sequence: Splice site sequence
ccggtacata

SEQ ID NO: 3764 - RNA, 10 nt, synthetic construct
  source 1..10: mol_type = other RNA
  misc_feature 1..10: note = Description of sequence: Splice site sequence
gcggtgagtg

SEQ ID NO: 3765 - RNA, 10 nt, synthetic construct
  source 1..10: mol_type = other RNA
  misc_feature 1..10: note = Description of sequence: Splice site sequence
ctggtgtgga

SEQ ID NO: 3766 - RNA, 10 nt, synthetic construct
  source 1..10: mol_type = other RNA
  misc_feature 1..10: note = Description of sequence: Splice site sequence
gaggtaattc

SEQ ID NO: 3767 - RNA, 10 nt, synthetic construct
  source 1..10: mol_type = other RNA
  misc_feature 1..10: note = Description of sequence: Splice site sequence
caagtacgta

SEQ ID NO: 3768 - RNA, 10 nt, synthetic construct
  source 1..10: mol_type = other RNA
  misc_feature 1..10: note = Description of sequence: Splice site sequence
taggttagga

SEQ ID NO: 3769 - RNA, 10 nt, synthetic construct
  source 1..10: mol_type = other RNA
  misc_feature 1..10: note = Description of sequence: Splice site sequence
atggcaggtg

SEQ ID NO: 3770 - RNA, 10 nt, synthetic construct
  source 1..10: mol_type = other RNA
  misc_feature 1..10: note = Description of sequence: Splice site sequence
taggcaagta

SEQ ID NO: 3771 - RNA, 10 nt, synthetic construct
  source 1..10: mol_type = other RNA
  misc_feature 1..10: note = Description of sequence: Splice site sequence
gcagcccgca

SEQ ID NO: 3772 - RNA, 10 nt, synthetic construct
  source 1..10: mol_type = other RNA
  misc_feature 1..10: note = Description of sequence: Splice site sequence
acggtaaact

SEQ ID NO: 3773 - RNA, 10 nt, synthetic construct
  source 1..10: mol_type = other RNA
  misc_feature 1..10: note = Description of sequence: Splice site sequence
gtagtagtct

SEQ ID NO: 3774 - RNA, 10 nt, synthetic construct
  source 1..10: mol_type = other RNA
  misc_feature 1..10: note = Description of sequence: Splice site sequence
gtggctgaaa

SEQ ID NO: 3775 - RNA, 10 nt, synthetic construct
  source 1..10: mol_type = other RNA
  misc_feature 1..10: note = Description of sequence: Splice site sequence
aaagtgattg

SEQ ID NO: 3776 - RNA, 10 nt, synthetic construct
  source 1..10: mol_type = other RNA
  misc_feature 1..10: note = Description of sequence: Splice site sequence
taggtctgga

SEQ ID NO: 3777 - RNA, 10 nt, synthetic construct
  source 1..10: mol_type = other RNA
  misc_feature 1..10: note = Description of sequence: Splice site sequence
gaggtgtttc

SEQ ID NO: 3778 - RNA, 10 nt, synthetic construct
  source 1..10: mol_type = other RNA
  misc_feature 1..10: note = Description of sequence: Splice site sequence
catgtacatc

SEQ ID NO: 3779 - RNA, 10 nt, synthetic construct
  source 1..10: mol_type = other RNA
  misc_feature 1..10: note = Description of sequence: Splice site sequence
aaggtttgaa

SEQ ID NO: 3780 - RNA, 10 nt, synthetic construct
  source 1..10: mol_type = other RNA
  misc_feature 1..10: note = Description of sequence: Splice site sequence
ccagcaagtg

SEQ ID NO: 3781 - RNA, 10 nt, synthetic construct
  source 1..10: mol_type = other RNA
  misc_feature 1..10: note = Description of sequence: Splice site sequence
taggtaataa

SEQ ID NO: 3782 - RNA, 10 nt, synthetic construct
  source 1..10: mol_type = other RNA
  misc_feature 1..10: note = Description of sequence: Splice site sequence
caggtcgtgg

SEQ ID NO: 3783 - RNA, 10 nt, synthetic construct
  source 1..10: mol_type = other RNA
  misc_feature 1..10: note = Description of sequence: Splice site sequence
gaagtatgcc

SEQ ID NO: 3784 - RNA, 10 nt, synthetic construct
  source 1..10: mol_type = other RNA
  misc_feature 1..10: note = Description of sequence: Splice site sequence
tcggtgccct

SEQ ID NO: 3785 - RNA, 10 nt, synthetic construct
  source 1..10: mol_type = other RNA
  misc_feature 1..10: note = Description of sequence: Splice site sequence
gaggtcagtc

SEQ ID NO: 3786 - RNA, 10 nt, synthetic construct
  source 1..10: mol_type = other RNA
  misc_feature 1..10: note = Description of sequence: Splice site sequence
tttgtctgta

SEQ ID NO: 3787 - RNA, 10 nt, synthetic construct
  source 1..10: mol_type = other RNA
  misc_feature 1..10: note = Description of sequence: Splice site sequence
caggtagata

SEQ ID NO: 3788 - RNA, 10 nt, synthetic construct
  source 1..10: mol_type = other RNA
  misc_feature 1..10: note = Description of sequence: Splice site sequence
tgggtatcag

SEQ ID NO: 3789 - RNA, 10 nt, synthetic construct
  source 1..10: mol_type = other RNA
  misc_feature 1..10: note = Description of sequence: Splice site sequence
atggtgagat

SEQ ID NO: 3790 - RNA, 10 nt, synthetic construct
  source 1..10: mol_type = other RNA
  misc_feature 1..10: note = Description of sequence: Splice site sequence
caggtaacac

SEQ ID NO: 3791 - RNA, 10 nt, synthetic construct
  source 1..10: mol_type = other RNA
  misc_feature 1..10: note = Description of sequence: Splice site sequence
ccggtatcct

SEQ ID NO: 3792 - RNA, 10 nt, synthetic construct
  source 1..10: mol_type = other RNA
  misc_feature 1..10: note = Description of sequence: Splice site sequence
tcagtacatc

SEQ ID NO: 3793 - RNA, 10 nt, synthetic construct
  source 1..10: mol_type = other RNA
  misc_feature 1..10: note = Description of sequence: Splice site sequence
ttggtaagac

SEQ ID NO: 3794 - RNA, 10 nt, synthetic construct
  source 1..10: mol_type = other RNA
  misc_feature 1..10: note = Description of sequence: Splice site sequence
ccggttagtc

SEQ ID NO: 3795 - RNA, 10 nt, synthetic construct
  source 1..10: mol_type = other RNA
  misc_feature 1..10: note = Description of sequence: Splice site sequence
acagtatgtc

SEQ ID NO: 3796 - RNA, 10 nt, synthetic construct
  source 1..10: mol_type = other RNA
  misc_feature 1..10: note = Description of sequence: Splice site sequence
caggtattaa

SEQ ID NO: 3797 - RNA, 10 nt, synthetic construct
  source 1..10: mol_type = other RNA
  misc_feature 1..10: note = Description of sequence: Splice site sequence
caggtggatc

SEQ ID NO: 3798 - RNA, 10 nt, synthetic construct
  source 1..10: mol_type = other RNA
  misc_feature 1..10: note = Description of sequence: Splice site sequence
agagtgcgta

SEQ ID NO: 3799 - RNA, 10 nt, synthetic construct
  source 1..10: mol_type = other RNA
  misc_feature 1..10: note = Description of sequence: Splice site sequence
aaggtgaccg

SEQ ID NO: 3800 - RNA, 10 nt, synthetic construct
  source 1..10: mol_type = other RNA
  misc_feature 1..10: note = Description of sequence: Splice site sequence
actgtatgta

SEQ ID NO: 3801 - RNA, 10 nt, synthetic construct
  source 1..10: mol_type = other RNA
  misc_feature 1..10: note = Description of sequence: Splice site sequence
taggtcaatt

SEQ ID NO: 3802 - RNA, 10 nt, synthetic construct
  source 1..10: mol_type = other RNA
  misc_feature 1..10: note = Description of sequence: Splice site sequence
agtgtgtaag

SEQ ID NO: 3803 - RNA, 10 nt, synthetic construct
  source 1..10: mol_type = other RNA
  misc_feature 1..10: note = Description of sequence: Splice site sequence
cgggtacctt

SEQ ID NO: 3804 - RNA, 10 nt, synthetic construct
  source 1..10: mol_type = other RNA
  misc_feature 1..10: note = Description of sequence: Splice site sequence
ctagtgagtt

SEQ ID NO: 3805 - RNA, 10 nt, synthetic construct
  source 1..10: mol_type = other RNA
  misc_feature 1..10: note = Description of sequence: Splice site sequence
caggtacaac

SEQ ID NO: 3806 - RNA, 10 nt, synthetic construct
  source 1..10: mol_type = other RNA
  misc_feature 1..10: note = Description of sequence: Splice site sequence
catgtacggc

SEQ ID NO: 3807 - RNA, 10 nt, synthetic construct
  source 1..10: mol_type = other RNA
  misc_feature 1..10: note = Description of sequence: Splice site sequence
atggtgtgag

SEQ ID NO: 3808 - RNA, 10 nt, synthetic construct
  source 1..10: mol_type = other RNA
  misc_feature 1..10: note = Description of sequence: Splice site sequence
agggtggaag

SEQ ID NO: 3809 - RNA, 10 nt, synthetic construct
  source 1..10: mol_type = other RNA
  misc_feature 1..10: note = Description of sequence: Splice site sequence
caggtgcgag

SEQ ID NO: 3810 - RNA, 10 nt, synthetic construct
  source 1..10: mol_type = other RNA
  misc_feature 1..10: note = Description of sequence: Splice site sequence
taggtgctcc

SEQ ID NO: 3811 - RNA, 10 nt, synthetic construct
  source 1..10: mol_type = other RNA
  misc_feature 1..10: note = Description of sequence: Splice site sequence
caggttttta

SEQ ID NO: 3812 - RNA, 10 nt, synthetic construct
  source 1..10: mol_type = other RNA
  misc_feature 1..10: note = Description of sequence: Splice site sequence
aacgtgaggt

SEQ ID NO: 3813 - RNA, 10 nt, synthetic construct
  source 1..10: mol_type = other RNA
  misc_feature 1..10: note = Description of sequence: Splice site sequence
cgggtaagag

SEQ ID NO: 3814 - RNA, 10 nt, synthetic construct
  source 1..10: mol_type = other RNA
  misc_feature 1..10: note = Description of sequence: Splice site sequence
tttgtcggta

SEQ ID NO: 3815 - RNA, 10 nt, synthetic construct
  source 1..10: mol_type = other RNA
  misc_feature 1..10: note = Description of sequence: Splice site sequence
taggttaagt

SEQ ID NO: 3816 - RNA, 10 nt, synthetic construct
  source 1..10: mol_type = other RNA
  misc_feature 1..10: note = Description of sequence: Splice site sequence
tcggtaaata

SEQ ID NO: 3817 - RNA, 10 nt, synthetic construct
  source 1..10: mol_type = other RNA
  misc_feature 1..10: note = Description of sequence: Splice site sequence
cctgtgagta

SEQ ID NO: 3818 - RNA, 10 nt, synthetic construct
  source 1..10: mol_type = other RNA
  misc_feature 1..10: note = Description of sequence: Splice site sequence
caggttatat

SEQ ID NO: 3819 - RNA, 10 nt, synthetic construct
  source 1..10: mol_type = other RNA
  misc_feature 1..10: note = Description of sequence: Splice site sequence
ctggtgaaca

SEQ ID NO: 3820 - RNA, 10 nt, synthetic construct
  source 1..10: mol_type = other RNA
  misc_feature 1..10: note = Description of sequence: Splice site sequence
tttgtgagta

SEQ ID NO: 3821 - RNA, 10 nt, synthetic construct
  source 1..10: mol_type = other RNA
  misc_feature 1..10: note = Description of sequence: Splice site sequence
cttgtacgcc

SEQ ID NO: 3822 - RNA, 10 nt, synthetic construct
  source 1..10: mol_type = other RNA
  misc_feature 1..10: note = Description of sequence: Splice site sequence
tgagccctgc

SEQ ID NO: 3823 - RNA, 10 nt, synthetic construct
  source 1..10: mol_type = other RNA
  misc_feature 1..10: note = Description of sequence: Splice site sequence
tgtgtatgta

SEQ ID NO: 3824 - RNA, 10 nt, synthetic construct
  source 1..10: mol_type = other RNA
  misc_feature 1..10: note = Description of sequence: Splice site sequence
aaggtagagg

SEQ ID NO: 3825 - RNA, 10 nt, synthetic construct
  source 1..10: mol_type = other RNA
  misc_feature 1..10: note = Description of sequence: Splice site sequence
aaggcatggt

SEQ ID NO: 3826 - RNA, 10 nt, synthetic construct
  source 1..10: mol_type = other RNA
  misc_feature 1..10: note = Description of sequence: Splice site sequence
actgtaattg

SEQ ID NO: 3827 - RNA, 10 nt, synthetic construct
  source 1..10: mol_type = other RNA
  misc_feature 1..10: note = Description of sequence: Splice site sequence
tcggtaccga

SEQ ID NO: 3828 - RNA, 10 nt, synthetic construct
  source 1..10: mol_type = other RNA
  misc_feature 1..10: note = Description of sequence: Splice site sequence
ctggtgagag

SEQ ID NO: 3829 - RNA, 10 nt, synthetic construct
  source 1..10: mol_type = other RNA
  misc_feature 1..10: note = Description of sequence: Splice site sequence
atggtaccac

SEQ ID NO: 3830 - RNA, 10 nt, synthetic construct
  source 1..10: mol_type = other RNA
  misc_feature 1..10: note = Description of sequence: Splice site sequence
taagttagtt

SEQ ID NO: 3831 - RNA, 10 nt, synthetic construct
  source 1..10: mol_type = other RNA
  misc_feature 1..10: note = Description of sequence: Splice site sequence
agagtgaggc

SEQ ID NO: 3832 - RNA, 10 nt, synthetic construct
  source 1..10: mol_type = other RNA
  misc_feature 1..10: note = Description of sequence: Splice site sequence
cgagtcagta

SEQ ID NO: 3833 - RNA, 10 nt, synthetic construct
  source 1..10: mol_type = other RNA
  misc_feature 1..10: note = Description of sequence: Splice site sequence
gaggtggtgg

SEQ ID NO: 3834 - RNA, 10 nt, synthetic construct
  source 1..10: mol_type = other RNA
  misc_feature 1..10: note = Description of sequence: Splice site sequence
acggtattgg

SEQ ID NO: 3835 - RNA, 10 nt, synthetic construct
  source 1..10: mol_type = other RNA
  misc_feature 1..10: note = Description of sequence: Splice site sequence
gctgcgagta

SEQ ID NO: 3836 - RNA, 10 nt, synthetic construct
  source 1..10: mol_type = other RNA
  misc_feature 1..10: note = Description of sequence: Splice site sequence
ggggtttgat

SEQ ID NO: 3837 - RNA, 10 nt, synthetic construct
  source 1..10: mol_type = other RNA
  misc_feature 1..10: note = Description of sequence: Splice site sequence
ctggcaggtg

SEQ ID NO: 3838 - RNA, 10 nt, synthetic construct
  source 1..10: mol_type = other RNA
  misc_feature 1..10: note = Description of sequence: Splice site sequence
gctgtctgtt

SEQ ID NO: 3839 - RNA, 10 nt, synthetic construct
  source 1..10: mol_type = other RNA
  misc_feature 1..10: note = Description of sequence: Splice site sequence
gaggtaacgg

SEQ ID NO: 3840 - RNA, 10 nt, synthetic construct
  source 1..10: mol_type = other RNA
  misc_feature 1..10: note = Description of sequence: Splice site sequence
ctggtattct

SEQ ID NO: 3841 - RNA, 10 nt, synthetic construct
  source 1..10: mol_type = other RNA
  misc_feature 1..10: note = Description of sequence: Splice site sequence
gtggtaaact

SEQ ID NO: 3842 - RNA, 10 nt, synthetic construct
  source 1..10: mol_type = other RNA
  misc_feature 1..10: note = Description of sequence: Splice site sequence
gaggcgagcg

SEQ ID NO: 3843 - RNA, 10 nt, synthetic construct
  source 1..10: mol_type = other RNA
  misc_feature 1..10: note = Description of sequence: Splice site sequence
tgtgtaagcg

SEQ ID NO: 3844 - RNA, 10 nt, synthetic construct
  source 1..10: mol_type = other RNA
  misc_feature 1..10: note = Description of sequence: Splice site sequence
acagtatgtg

SEQ ID NO: 3845 - RNA, 10 nt, synthetic construct
  source 1..10: mol_type = other RNA
  misc_feature 1..10: note = Description of sequence: Splice site sequence
ccggtgggga

SEQ ID NO: 3846 - RNA, 10 nt, synthetic construct
  source 1..10: mol_type = other RNA
  misc_feature 1..10: note = Description of sequence: Splice site sequence
gaggtcagtg

SEQ ID NO: 3847 - RNA, 10 nt, synthetic construct
  source 1..10: mol_type = other RNA
  misc_feature 1..10: note = Description of sequence: Splice site sequence
agggtaaggt

SEQ ID NO: 3848 - RNA, 10 nt, synthetic construct
  source 1..10: mol_type = other RNA
  misc_feature 1..10: note = Description of sequence: Splice site sequence
ggtgtaaggt

SEQ ID NO: 3849 - RNA, 10 nt, synthetic construct
  source 1..10: mol_type = other RNA
  misc_feature 1..10: note = Description of sequence: Splice site sequence
caggtattcc

SEQ ID NO: 3850 - RNA, 10 nt, synthetic construct
  source 1..10: mol_type = other RNA
  misc_feature 1..10: note = Description of sequence: Splice site sequence
ctggtataaa

SEQ ID NO: 3851 - RNA, 10 nt, synthetic construct
  source 1..10: mol_type = other RNA
  misc_feature 1..10: note = Description of sequence: Splice site sequence
ccggtctgtg

SEQ ID NO: 3852 - RNA, 10 nt, synthetic construct
  source 1..10: mol_type = other RNA
  misc_feature 1..10: note = Description of sequence: Splice site sequence
caagtccacc

SEQ ID NO: 3853 - RNA, 10 nt, synthetic construct
  source 1..10: mol_type = other RNA
  misc_feature 1..10: note = Description of sequence: Splice site sequence
caagttggtg

SEQ ID NO: 3854 - RNA, 10 nt, synthetic construct
  source 1..10: mol_type = other RNA
  misc_feature 1..10: note = Description of sequence: Splice site sequence
caggtaaaat

SEQ ID NO: 3855 - RNA, 10 nt, synthetic construct
  source 1..10: mol_type = other RNA
  misc_feature 1..10: note = Description of sequence: Splice site sequence
acggtaagga

SEQ ID NO: 3856 - RNA, 10 nt, synthetic construct
  source 1..10: mol_type = other RNA
  misc_feature 1..10: note = Description of sequence: Splice site sequence
tgggtaataa

SEQ ID NO: 3857 - RNA, 10 nt, synthetic construct
  source 1..10: mol_type = other RNA
  misc_feature 1..10: note = Description of sequence: Splice site sequence
ccggtaggtt

SEQ ID NO: 3858 - RNA, 10 nt, synthetic construct
  source 1..10: mol_type = other RNA
  misc_feature 1..10: note = Description of sequence: Splice site sequence
agagtatgga

SEQ ID NO: 3859 - RNA, 10 nt, synthetic construct
  source 1..10: mol_type = other RNA
  misc_feature 1..10: note = Description of sequence: Splice site sequence
ctcgtgagtc

SEQ ID NO: 3860 - RNA, 10 nt, synthetic construct
  source 1..10: mol_type = other RNA
  misc_feature 1..10: note = Description of sequence: Splice site sequence
aaagccggtg

SEQ ID NO: 3861 - RNA, 10 nt, synthetic construct
  source 1..10: mol_type = other RNA
  misc_feature 1..10: note = Description of sequence: Splice site sequence
cctgtgtgag

SEQ ID NO: 3862 - RNA, 10 nt, synthetic construct
  source 1..10: mol_type = other RNA
  misc_feature 1..10: note = Description of sequence: Splice site sequence
ccggtaaatg

SEQ ID NO: 3863 - RNA, 10 nt, synthetic construct
  source 1..10: mol_type = other RNA
  misc_feature 1..10: note = Description of sequence: Splice site sequence
caggtgaagc

SEQ ID NO: 3864 - RNA, 10 nt, synthetic construct
  source 1..10: mol_type = other RNA
  misc_feature 1..10: note = Description of sequence: Splice site sequence
tcggtaggtc

SEQ ID NO: 3865 - RNA, 10 nt, synthetic construct
  source 1..10: mol_type = other RNA
  misc_feature 1..10: note = Description of sequence: Splice site sequence
cgggtgaggc

SEQ ID NO: 3866 - RNA, 10 nt, synthetic construct
  source 1..10: mol_type = other RNA
  misc_feature 1..10: note = Description of sequence: Splice site sequence
catgtccacc

SEQ ID NO: 3867 - RNA, 10 nt, synthetic construct
  source 1..10: mol_type = other RNA
  misc_feature 1..10: note = Description of sequence: Splice site sequence
aaggtgaccc

SEQ ID NO: 3868 - RNA, 10 nt, synthetic construct
  source 1..10: mol_type = other RNA
  misc_feature 1..10: note = Description of sequence: Splice site sequence
cgggttagta

SEQ ID NO: 3869 - RNA, 10 nt, synthetic construct
  source 1..10: mol_type = other RNA
  misc_feature 1..10: note = Description of sequence: Splice site sequence
gcggtagtaa

SEQ ID NO: 3870 - RNA, 10 nt, synthetic construct
  source 1..10: mol_type = other RNA
  misc_feature 1..10: note = Description of sequence: Splice site sequence
gctgtaggta

SEQ ID NO: 3871 - RNA, 10 nt, synthetic construct
  source 1..10: mol_type = other RNA
  misc_feature 1..10: note = Description of sequence: Splice site sequence
cctgttgagt

SEQ ID NO: 3872 - RNA, 10 nt, synthetic construct
  source 1..10: mol_type = other RNA
  misc_feature 1..10: note = Description of sequence: Splice site sequence
agggtaagac

SEQ ID NO: 3873 - RNA, 10 nt, synthetic construct
  source 1..10: mol_type = other RNA
  misc_feature 1..10: note = Description of sequence: Splice site sequence
tttgtaggca

SEQ ID NO: 3874 - RNA, 10 nt, synthetic construct
  source 1..10: mol_type = other RNA
  misc_feature 1..10: note = Description of sequence: Splice site sequence
agggtgagat

SEQ ID NO: 3875 - RNA, 10 nt, synthetic construct
  source 1..10: mol_type = other RNA
  misc_feature 1..10: note = Description of sequence: Splice site sequence
atagtaaaga

SEQ ID NO: 3876 - RNA, 10 nt, synthetic construct
  source 1..10: mol_type = other RNA
  misc_feature 1..10: note = Description of sequence: Splice site sequence
aaggtgcagg

SEQ ID NO: 3877 - RNA, 10 nt, synthetic construct
  source 1..10: mol_type = other RNA
  misc_feature 1..10: note = Description of sequence: Splice site sequence
gaggtgattt

SEQ ID NO: 3878 - RNA, 10 nt, synthetic construct
  source 1..10: mol_type = other RNA
  misc_feature 1..10: note = Description of sequence: Splice site sequence
caggttggct

SEQ ID NO: 3879 - RNA, 10 nt, synthetic construct
  source 1..10: mol_type = other RNA
  misc_feature 1..10: note = Description of sequence: Splice site sequence
cgggtatggg

SEQ ID NO: 3880 - RNA, 10 nt, synthetic construct
  source 1..10: mol_type = other RNA
  misc_feature 1..10: note = Description of sequence: Splice site sequence
atggtccatc

SEQ ID NO: 3881 - RNA, 10 nt, synthetic construct
  source 1..10: mol_type = other RNA
  misc_feature 1..10: note = Description of sequence: Splice site sequence
ccggttggtg

SEQ ID NO: 3882 - RNA, 10 nt, synthetic construct
  source 1..10: mol_type = other RNA
  misc_feature 1..10: note = Description of sequence: Splice site sequence
ggagtaagtc

SEQ ID NO: 3883 - RNA, 10 nt, synthetic construct
  source 1..10: mol_type = other RNA
  misc_feature 1..10: note = Description of sequence: Splice site sequence
tatgtctttg

SEQ ID NO: 3884 - RNA, 10 nt, synthetic construct
  source 1..10: mol_type = other RNA
  misc_feature 1..10: note = Description of sequence: Splice site sequence
acggtacttc

SEQ ID NO: 3885 - RNA, 10 nt, synthetic construct
  source 1..10: mol_type = other RNA
  misc_feature 1..10: note = Description of sequence: Splice site sequence
aaggcacgcg

SEQ ID NO: 3886 - RNA, 10 nt, synthetic construct
  source 1..10: mol_type = other RNA
  misc_feature 1..10: note = Description of sequence: Splice site sequence
cttgtgggta

SEQ ID NO: 3887 - RNA, 10 nt, synthetic construct
  source 1..10: mol_type = other RNA
  misc_feature 1..10: note = Description of sequence: Splice site sequence
gaggtggaga

SEQ ID NO: 3888 - RNA, 10 nt, synthetic construct
  source 1..10: mol_type = other RNA
  misc_feature 1..10: note = Description of sequence: Splice site sequence
gtggtggctg

SEQ ID NO: 3889 - RNA, 10 nt, synthetic construct
  source 1..10: mol_type = other RNA
  misc_feature 1..10: note = Description of sequence: Splice site sequence
aacgtgagta

SEQ ID NO: 3890 - RNA, 10 nt, synthetic construct
  source 1..10: mol_type = other RNA
  misc_feature 1..10: note = Description of sequence: Splice site sequence
gaagctgtaa

SEQ ID NO: 3891 - RNA, 10 nt, synthetic construct
  source 1..10: mol_type = other RNA
  misc_feature 1..10: note = Description of sequence: Splice site sequence
cgggtatctt

SEQ ID NO: 3892 - RNA, 10 nt, synthetic construct
  source 1..10: mol_type = other RNA
  misc_feature 1..10: note = Description of sequence: Splice site sequence
aatgtacgca

SEQ ID NO: 3893 - RNA, 10 nt, synthetic construct
  source 1..10: mol_type = other RNA
  misc_feature 1..10: note = Description of sequence: Splice site sequence
ccggtgggta

SEQ ID NO: 3894 - RNA, 10 nt, synthetic construct
  source 1..10: mol_type = other RNA
  misc_feature 1..10: note = Description of sequence: Splice site sequence
tgggtgaggt

SEQ ID NO: 3895 - RNA, 10 nt, synthetic construct
  source 1..10: mol_type = other RNA
  misc_feature 1..10: note = Description of sequence: Splice site sequence
cctgtgaata

SEQ ID NO: 3896 - RNA, 10 nt, synthetic construct
  source 1..10: mol_type = other RNA
  misc_feature 1..10: note = Description of sequence: Splice site sequence
gctgtgtgtg

SEQ ID NO: 3897 - RNA, 10 nt, synthetic construct
  source 1..10: mol_type = other RNA
  misc_feature 1..10: note = Description of sequence: Splice site sequence
agggtaatgt

SEQ ID NO: 3898 - RNA, 10 nt, synthetic construct
  source 1..10: mol_type = other RNA
  misc_feature 1..10: note = Description of sequence: Splice site sequence
accgtaagtt

SEQ ID NO: 3899 - RNA, 10 nt, synthetic construct
  source 1..10: mol_type = other RNA
  misc_feature 1..10: note = Description of sequence: Splice site sequence
cgtgtaagta

SEQ ID NO: 3900 - RNA, 10 nt, synthetic construct
  source 1..10: mol_type = other RNA
  misc_feature 1..10: note = Description of sequence: Splice site sequence
ggggtaagtc

SEQ ID NO: 3901 - RNA, 10 nt, synthetic construct
  source 1..10: mol_type = other RNA
  misc_feature 1..10: note = Description of sequence: Splice site sequence
aatgtatgat

SEQ ID NO: 3902 - RNA, 10 nt, synthetic construct
  source 1..10: mol_type = other RNA
  misc_feature 1..10: note = Description of sequence: Splice site sequence
aatgtgatta

SEQ ID NO: 3903 - RNA, 10 nt, synthetic construct
  source 1..10: mol_type = other RNA
  misc_feature 1..10: note = Description of sequence: Splice site sequence
caggtccgtc

SEQ ID NO: 3904 - RNA, 10 nt, synthetic construct
  source 1..10: mol_type = other RNA
  misc_feature 1..10: note = Description of sequence: Splice site sequence
gaagtattga

SEQ ID NO: 3905 - RNA, 10 nt, synthetic construct
  source 1..10: mol_type = other RNA
  misc_feature 1..10: note = Description of sequence: Splice site sequence
caggtcggtt

SEQ ID NO: 3906 - RNA, 10 nt, synthetic construct
  source 1..10: mol_type = other RNA
  misc_feature 1..10: note = Description of sequence: Splice site sequence
tacgtgagta

SEQ ID NO: 3907 - RNA, 10 nt, synthetic construct
  source 1..10: mol_type = other RNA
  misc_feature 1..10: note = Description of sequence: Splice site sequence
ttggtaagca

SEQ ID NO: 3908 - RNA, 10 nt, synthetic construct
  source 1..10: mol_type = other RNA
  misc_feature 1..10: note = Description of sequence: Splice site sequence
gcggtgagtc

SEQ ID NO: 3909 - RNA, 10 nt, synthetic construct
  source 1..10: mol_type = other RNA
  misc_feature 1..10: note = Description of sequence: Splice site sequence
gaagtaaggg

SEQ ID NO: 3910 - RNA, 10 nt, synthetic construct
  source 1..10: mol_type = other RNA
  misc_feature 1..10: note = Description of sequence: Splice site sequence
cgcgtgagtt

SEQ ID NO: 3911 - RNA, 10 nt, synthetic construct
  source 1..10: mol_type = other RNA
  misc_feature 1..10: note = Description of sequence: Splice site sequence
caggtacccc

SEQ ID NO: 3912 - RNA, 10 nt, synthetic construct
  source 1..10: mol_type = other RNA
  misc_feature 1..10: note = Description of sequence: Splice site sequence
tctgtaagac

SEQ ID NO: 3913 - RNA, 10 nt, synthetic construct
  source 1..10: mol_type = other RNA
  misc_feature 1..10: note = Description of sequence: Splice site sequence
aatgtaagac

SEQ ID NO: 3914 - RNA, 10 nt, synthetic construct
  source 1..10: mol_type = other RNA
  misc_feature 1..10: note = Description of sequence: Splice site sequence
caggcaaggg

SEQ ID NO: 3915 - RNA, 10 nt, synthetic construct
  source 1..10: mol_type = other RNA
  misc_feature 1..10: note = Description of sequence: Splice site sequence
aaagtttgtc

SEQ ID NO: 3916 - RNA, 10 nt, synthetic construct
  source 1..10: mol_type = other RNA
  misc_feature 1..10: note = Description of sequence: Splice site sequence
tcggtaagtc

SEQ ID NO: 3917 - RNA, 10 nt, synthetic construct
  source 1..10: mol_type = other RNA
  misc_feature 1..10: note = Description of sequence: Splice site sequence
cttgtgagat

SEQ ID NO: 3918 - RNA, 10 nt, synthetic construct
  source 1..10: mol_type = other RNA
  misc_feature 1..10: note = Description of sequence: Splice site sequence
agagtgagct

SEQ ID NO: 3919 - RNA, 10 nt, synthetic construct
  source 1..10: mol_type = other RNA
  misc_feature 1..10: note = Description of sequence: Splice site sequence
taagtgggga

SEQ ID NO: 3920 - RNA, 10 nt, synthetic construct
  source 1..10: mol_type = other RNA
  misc_feature 1..10: note = Description of sequence: Splice site sequence
agggtaatca

SEQ ID NO: 3921 - RNA, 10 nt, synthetic construct
  source 1..10: mol_type = other RNA
  misc_feature 1..10: note = Description of sequence: Splice site sequence
aaggttcagc

SEQ ID NO: 3922 - RNA, 10 nt, synthetic construct
  source 1..10: mol_type = other RNA
  misc_feature 1..10: note = Description of sequence: Splice site sequence
ccggtatatt

SEQ ID NO: 3923 - RNA, 10 nt, synthetic construct
  source 1..10: mol_type = other RNA
  misc_feature 1..10: note = Description of sequence: Splice site sequence
accgtatgtg

SEQ ID NO: 3924 - RNA, 10 nt, synthetic construct
  source 1..10: mol_type = other RNA
  misc_feature 1..10: note = Description of sequence: Splice site sequence
caggtatagt

SEQ ID NO: 3925 - RNA, 10 nt, synthetic construct
  source 1..10: mol_type = other RNA
  misc_feature 1..10: note = Description of sequence: Splice site sequence
caggtattac

SEQ ID NO: 3926 - RNA, 10 nt, synthetic construct
  source 1..10: mol_type = other RNA
  misc_feature 1..10: note = Description of sequence: Splice site sequence
ctggtgatgg

SEQ ID NO: 3927 - RNA, 10 nt, synthetic construct
  source 1..10: mol_type = other RNA
  misc_feature 1..10: note = Description of sequence: Splice site sequence
ccggtgagca

SEQ ID NO: 3928 - RNA, 10 nt, synthetic construct
  source 1..10: mol_type = other RNA
  misc_feature 1..10: note = Description of sequence: Splice site sequence
aaggtactgg

SEQ ID NO: 3929 - RNA, 10 nt, synthetic construct
  source 1..10: mol_type = other RNA
  misc_feature 1..10: note = Description of sequence: Splice site sequence
gcggtcagga

SEQ ID NO: 3930 - RNA, 10 nt, synthetic construct
  source 1..10: mol_type = other RNA
  misc_feature 1..10: note = Description of sequence: Splice site sequence
ctggtcaggg

SEQ ID NO: 3931 - RNA, 10 nt, synthetic construct
  source 1..10: mol_type = other RNA
  misc_feature 1..10: note = Description of sequence: Splice site sequence
aaagtacgtt

SEQ ID NO: 3932 - RNA, 10 nt, synthetic construct
  source 1..10: mol_type = other RNA
  misc_feature 1..10: note = Description of sequence: Splice site sequence
agggtaagct

SEQ ID NO: 3933 - RNA, 10 nt, synthetic construct
  source 1..10: mol_type = other RNA
  misc_feature 1..10: note = Description of sequence: Splice site sequence
ccggccacca

SEQ ID NO: 3934 - RNA, 10 nt, synthetic construct
  source 1..10: mol_type = other RNA
  misc_feature 1..10: note = Description of sequence: Splice site sequence
caggcgagca

SEQ ID NO: 3935 - RNA, 10 nt, synthetic construct
  source 1..10: mol_type = other RNA
  misc_feature 1..10: note = Description of sequence: Splice site sequence
agagtaggat

SEQ ID NO: 3936 - RNA, 10 nt, synthetic construct
  source 1..10: mol_type = other RNA
  misc_feature 1..10: note = Description of sequence: Splice site sequence
ctggtttcaa

SEQ ID NO: 3937 - RNA, 10 nt, synthetic construct
  source 1..10: mol_type = other RNA
  misc_feature 1..10: note = Description of sequence: Splice site sequence
gaggtaaact

SEQ ID NO: 3938 - RNA, 10 nt, synthetic construct
  source 1..10: mol_type = other RNA
  misc_feature 1..10: note = Description of sequence: Splice site sequence
ttggtaatct

SEQ ID NO: 3939 - RNA, 10 nt, synthetic construct
  source 1..10: mol_type = other RNA
  misc_feature 1..10: note = Description of sequence: Splice site sequence
agggcagaat

SEQ ID NO: 3940 - RNA, 10 nt, synthetic construct
  source 1..10: mol_type = other RNA
  misc_feature 1..10: note = Description of sequence: Splice site sequence
gctgcaggtg

SEQ ID NO: 3941 - RNA, 10 nt, synthetic construct
  source 1..10: mol_type = other RNA
  misc_feature 1..10: note = Description of sequence: Splice site sequence
gaagcacgtg

SEQ ID NO: 3942 - RNA, 10 nt, synthetic construct
  source 1..10: mol_type = other RNA
  misc_feature 1..10: note = Description of sequence: Splice site sequence
catgtaaaca

SEQ ID NO: 3943 - RNA, 10 nt, synthetic construct
  source 1..10: mol_type = other RNA
  misc_feature 1..10: note = Description of sequence: Splice site sequence
agggtagcta

SEQ ID NO: 3944 - RNA, 10 nt, synthetic construct
  source 1..10: mol_type = other RNA
  misc_feature 1..10: note = Description of sequence: Splice site sequence
ggagtatgta

SEQ ID NO: 3945 - RNA, 10 nt, synthetic construct
  source 1..10: mol_type = other RNA
  misc_feature 1..10: note = Description of sequence: Splice site sequence
aaagtacgga

SEQ ID NO: 3946 - RNA, 10 nt, synthetic construct
  source 1..10: mol_type = other RNA
  misc_feature 1..10: note = Description of sequence: Splice site sequence
ggggtaattg

SEQ ID NO: 3947 - RNA, 10 nt, synthetic construct
  source 1..10: mol_type = other RNA
  misc_feature 1..10: note = Description of sequence: Splice site sequence
gtggtacgta

SEQ ID NO: 3948 - RNA, 10 nt, synthetic construct
  source 1..10: mol_type = other RNA
  misc_feature 1..10: note = Description of sequence: Splice site sequence
aaggtacagc

SEQ ID NO: 3949 - RNA, 10 nt, synthetic construct
  source 1..10: mol_type = other RNA
  misc_feature 1..10: note = Description of sequence: Splice site sequence
gaggtgaaga

SEQ ID NO: 3950 - RNA, 10 nt, synthetic construct
  source 1..10: mol_type = other RNA
  misc_feature 1..10: note = Description of sequence: Splice site sequence
tgagtaggtc

SEQ ID NO: 3951 - RNA, 10 nt, synthetic construct
  source 1..10: mol_type = other RNA
  misc_feature 1..10: note = Description of sequence: Splice site sequence
tcagtaagac

SEQ ID NO: 3952 - RNA, 10 nt, synthetic construct
  source 1..10: mol_type = other RNA
  misc_feature 1..10: note = Description of sequence: Splice site sequence
aaggcaaaac

SEQ ID NO: 3953 - RNA, 10 nt, synthetic construct
  source 1..10: mol_type = other RNA
  misc_feature 1..10: note = Description of sequence: Splice site sequence
gaggctgtgc

SEQ ID NO: 3954 - RNA, 10 nt, synthetic construct
  source 1..10: mol_type = other RNA
  misc_feature 1..10: note = Description of sequence: Splice site sequence
agagtatggt

SEQ ID NO: 3955 - RNA, 10 nt, synthetic construct
  source 1..10: mol_type = other RNA
  misc_feature 1..10: note = Description of sequence: Splice site sequence
gctgctgagc

SEQ ID NO: 3956 - RNA, 10 nt, synthetic construct
  source 1..10: mol_type = other RNA
  misc_feature 1..10: note = Description of sequence: Splice site sequence
taggtcagaa

SEQ ID NO: 3957 - RNA, 10 nt, synthetic construct
  source 1..10: mol_type = other RNA
  misc_feature 1..10: note = Description of sequence: Splice site sequence
ccggtaggtg

SEQ ID NO: 3958 - RNA, 10 nt, synthetic construct
  source 1..10: mol_type = other RNA
  misc_feature 1..10: note = Description of sequence: Splice site sequence
gcagtatgat

SEQ ID NO: 3959 - RNA, 10 nt, synthetic construct
  source 1..10: mol_type = other RNA
  misc_feature 1..10: note = Description of sequence: Splice site sequence
caggtttcag

SEQ ID NO: 3960 - RNA, 10 nt, synthetic construct
  source 1..10: mol_type = other RNA
  misc_feature 1..10: note = Description of sequence: Splice site sequence
gaggtttgcc

SEQ ID NO: 3961 - RNA, 10 nt, synthetic construct
  source 1..10: mol_type = other RNA
  misc_feature 1..10: note = Description of sequence: Splice site sequence
ggggtggggg

SEQ ID NO: 3962 - RNA, 10 nt, synthetic construct
  source 1..10: mol_type = other RNA
  misc_feature 1..10: note = Description of sequence: Splice site sequence
gcggttagtg

SEQ ID NO: 3963 - RNA, 10 nt, synthetic construct
  source 1..10: mol_type = other RNA
  misc_feature 1..10: note = Description of sequence: Splice site sequence
atggtagttg

SEQ ID NO: 3964 - RNA, 10 nt, synthetic construct
  source 1..10: mol_type = other RNA
  misc_feature 1..10: note = Description of sequence: Splice site sequence
catgtaagac

SEQ ID NO: 3965 - RNA, 10 nt, synthetic construct
  source 1..10: mol_type = other RNA
  misc_feature 1..10: note = Description of sequence: Splice site sequence
ttcgtaagga

SEQ ID NO: 3966 - RNA, 10 nt, synthetic construct
  source 1..10: mol_type = other RNA
  misc_feature 1..10: note = Description of sequence: Splice site sequence
gaagtatgac

SEQ ID NO: 3967 - RNA, 10 nt, synthetic construct
  source 1..10: mol_type = other RNA
  misc_feature 1..10: note = Description of sequence: Splice site sequence
catgtagggc

SEQ ID NO: 3968 - RNA, 10 nt, synthetic construct
  source 1..10: mol_type = other RNA
  misc_feature 1..10: note = Description of sequence: Splice site sequence
accgtcagga

SEQ ID NO: 3969 - RNA, 10 nt, synthetic construct
  source 1..10: mol_type = other RNA
  misc_feature 1..10: note = Description of sequence: Splice site sequence
cgtgttcgat

SEQ ID NO: 3970 - RNA, 10 nt, synthetic construct
  source 1..10: mol_type = other RNA
  misc_feature 1..10: note = Description of sequence: Splice site sequence
gaggcaggac

SEQ ID NO: 3971 - RNA, 10 nt, synthetic construct
  source 1..10: mol_type = other RNA
  misc_feature 1..10: note = Description of sequence: Splice site sequence
tcggtatact

SEQ ID NO: 3972 - RNA, 10 nt, synthetic construct
  source 1..10: mol_type = other RNA
  misc_feature 1..10: note = Description of sequence: Splice site sequence
taggttgtgc

SEQ ID NO: 3973 - RNA, 10 nt, synthetic construct
  source 1..10: mol_type = other RNA
  misc_feature 1..10: note = Description of sequence: Splice site sequence
ccggtgagtc

SEQ ID NO: 3974 - RNA, 10 nt, synthetic construct
  source 1..10: mol_type = other RNA
  misc_feature 1..10: note = Description of sequence: Splice site sequence
gtggtgaggg

SEQ ID NO: 3975 - RNA, 10 nt, synthetic construct
  source 1..10: mol_type = other RNA
  misc_feature 1..10: note = Description of sequence: Splice site sequence
tgggtcagta

SEQ ID NO: 3976 - RNA, 10 nt, synthetic construct
  source 1..10: mol_type = other RNA
  misc_feature 1..10: note = Description of sequence: Splice site sequence
cctgttggta

SEQ ID NO: 3977 - RNA, 10 nt, synthetic construct
  source 1..10: mol_type = other RNA
  misc_feature 1..10: note = Description of sequence: Splice site sequence
gaggtatcca

SEQ ID NO: 3978 - RNA, 10 nt, synthetic construct
  source 1..10: mol_type = other RNA
  misc_feature 1..10: note = Description of sequence: Splice site sequence
aaagttaaag

SEQ ID NO: 3979 - RNA, 10 nt, synthetic construct
  source 1..10: mol_type = other RNA
  misc_feature 1..10: note = Description of sequence: Splice site sequence
gaggtgctat

SEQ ID NO: 3980 - RNA, 10 nt, synthetic construct
  source 1..10: mol_type = other RNA
  misc_feature 1..10: note = Description of sequence: Splice site sequence
cttgtgtgca

SEQ ID NO: 3981 - RNA, 10 nt, synthetic construct
  source 1..10: mol_type = other RNA
  misc_feature 1..10: note = Description of sequence: Splice site sequence
tgagctgggg

SEQ ID NO: 3982 - RNA, 10 nt, synthetic construct
  source 1..10: mol_type = other RNA
  misc_feature 1..10: note = Description of sequence: Splice site sequence
aaggtatagt

SEQ ID NO: 3983 - RNA, 10 nt, synthetic construct
  source 1..10: mol_type = other RNA
  misc_feature 1..10: note = Description of sequence: Splice site sequence
ggggtgaggt

SEQ ID NO: 3984 - RNA, 10 nt, synthetic construct
  source 1..10: mol_type = other RNA
  misc_feature 1..10: note = Description of sequence: Splice site sequence
gaggcaagca

SEQ ID NO: 3985 - RNA, 10 nt, synthetic construct
  source 1..10: mol_type = other RNA
  misc_feature 1..10: note = Description of sequence: Splice site sequence
ggagtaacgt

SEQ ID NO: 3986 - RNA, 10 nt, synthetic construct
  source 1..10: mol_type = other RNA
  misc_feature 1..10: note = Description of sequence: Splice site sequence
agagtaagta

SEQ ID NO: 3987 - RNA, 10 nt, synthetic construct
  source 1..10: mol_type = other RNA
  misc_feature 1..10: note = Description of sequence: Splice site sequence
gaggcaacca

SEQ ID NO: 3988 - RNA, 10 nt, synthetic construct
  source 1..10: mol_type = other RNA
  misc_feature 1..10: note = Description of sequence: Splice site sequence
agggtaaatg

SEQ ID NO: 3989 - RNA, 10 nt, synthetic construct
  source 1..10: mol_type = other RNA
  misc_feature 1..10: note = Description of sequence: Splice site sequence
gctgtgcgtg

SEQ ID NO: 3990 - RNA, 10 nt, synthetic construct
  source 1..10: mol_type = other RNA
  misc_feature 1..10: note = Description of sequence: Splice site sequence
gaggttcgcc

SEQ ID NO: 3991 - RNA, 10 nt, synthetic construct
  source 1..10: mol_type = other RNA
  misc_feature 1..10: note = Description of sequence: Splice site sequence
aaggcttgca

SEQ ID NO: 3992 - RNA, 10 nt, synthetic construct
  source 1..10: mol_type = other RNA
  misc_feature 1..10: note = Description of sequence: Splice site sequence
atagtaagtc

SEQ ID NO: 3993 - RNA, 10 nt, synthetic construct
  source 1..10: mol_type = other RNA
  misc_feature 1..10: note = Description of sequence: Splice site sequence
gcagcaggta

SEQ ID NO: 3994 - RNA, 10 nt, synthetic construct
  source 1..10: mol_type = other RNA
  misc_feature 1..10: note = Description of sequence: Splice site sequence
agcgtaagcc

SEQ ID NO: 3995 - RNA, 10 nt, synthetic construct
  source 1..10: mol_type = other RNA
  misc_feature 1..10: note = Description of sequence: Splice site sequence
ctggttcgaa

SEQ ID NO: 3996 - RNA, 10 nt, synthetic construct
  source 1..10: mol_type = other RNA
  misc_feature 1..10: note = Description of sequence: Splice site sequence
ctggtcattg

SEQ ID NO: 3997 - RNA, 10 nt, synthetic construct
  source 1..10: mol_type = other RNA
  misc_feature 1..10: note = Description of sequence: Splice site sequence
gaggtgtagt

SEQ ID NO: 3998 - RNA, 10 nt, synthetic construct
  source 1..10: mol_type = other RNA
  misc_feature 1..10: note = Description of sequence: Splice site sequence
gaggtgtcct

SEQ ID NO: 3999 - RNA, 10 nt, synthetic construct
  source 1..10: mol_type = other RNA
  misc_feature 1..10: note = Description of sequence: Splice site sequence
agtgccctga

SEQ ID NO: 4000 - RNA, 10 nt, synthetic construct
  source 1..10: mol_type = other RNA
  misc_feature 1..10: note = Description of sequence: Splice site sequence
tgtgtgtgta

SEQ ID NO: 4001 - RNA, 10 nt, synthetic construct
  source 1..10: mol_type = other RNA
  misc_feature 1..10: note = Description of sequence: Splice site sequence
ctggtacagt

SEQ ID NO: 4002 - RNA, 10 nt, synthetic construct
  source 1..10: mol_type = other RNA
  misc_feature 1..10: note = Description of sequence: Splice site sequence
ttggtacgta

SEQ ID NO: 4003 - RNA, 10 nt, synthetic construct
  source 1..10: mol_type = other RNA
  misc_feature 1..10: note = Description of sequence: Splice site sequence
tctgtacgta

SEQ ID NO: 4004 - RNA, 10 nt, synthetic construct
  source 1..10: mol_type = other RNA
  misc_feature 1..10: note = Description of sequence: Splice site sequence
taagtaattc

SEQ ID NO: 4005 - RNA, 10 nt, synthetic construct
  source 1..10: mol_type = other RNA
  misc_feature 1..10: note = Description of sequence: Splice site sequence
cacgtatgtg

SEQ ID NO: 4006 - RNA, 10 nt, synthetic construct
  source 1..10: mol_type = other RNA
  misc_feature 1..10: note = Description of sequence: Splice site sequence
tcggtgagtg

SEQ ID NO: 4007 - RNA, 10 nt, synthetic construct
  source 1..10: mol_type = other RNA
  misc_feature 1..10: note = Description of sequence: Splice site sequence
aaggttcaga

SEQ ID NO: 4008 - RNA, 10 nt, synthetic construct
  source 1..10: mol_type = other RNA
  misc_feature 1..10: note = Description of sequence: Splice site sequence
agggtacttc

SEQ ID NO: 4009 - RNA, 10 nt, synthetic construct
  source 1..10: mol_type = other RNA
  misc_feature 1..10: note = Description of sequence: Splice site sequence
gcggcaggtt

SEQ ID NO: 4010 - RNA, 10 nt, synthetic construct
  source 1..10: mol_type = other RNA
  misc_feature 1..10: note = Description of sequence: Splice site sequence
gaggcccgtg

SEQ ID NO: 4011 - RNA, 10 nt, synthetic construct
  source 1..10: mol_type = other RNA
  misc_feature 1..10: note = Description of sequence: Splice site sequence
caggtataaa

SEQ ID NO: 4012 - RNA, 10 nt, synthetic construct
  source 1..10: mol_type = other RNA
  misc_feature 1..10: note = Description of sequence: Splice site sequence
atggtcaagt

SEQ ID NO: 4013 - RNA, 10 nt, synthetic construct
  source 1..10: mol_type = other RNA
  misc_feature 1..10: note = Description of sequence: Splice site sequence
gtggtttgtt

SEQ ID NO: 4014 - RNA, 10 nt, synthetic construct
  source 1..10: mol_type = other RNA
  misc_feature 1..10: note = Description of sequence: Splice site sequence
agagtgagga

SEQ ID NO: 4015 - RNA, 10 nt, synthetic construct
  source 1..10: mol_type = other RNA
  misc_feature 1..10: note = Description of sequence: Splice site sequence
taggcgtgag

SEQ ID NO: 4016 - RNA, 10 nt, synthetic construct
  source 1..10: mol_type = other RNA
  misc_feature 1..10: note = Description of sequence: Splice site sequence
aaggtactcc

SEQ ID NO: 4017 - RNA, 10 nt, synthetic construct
  source 1..10: mol_type = other RNA
  misc_feature 1..10: note = Description of sequence: Splice site sequence
gaggtatgat

SEQ ID NO: 4018 - RNA, 10 nt, synthetic construct
  source 1..10: mol_type = other RNA
  misc_feature 1..10: note = Description of sequence: Splice site sequence
ggggtcggta

SEQ ID NO: 4019 - RNA, 10 nt, synthetic construct
  source 1..10: mol_type = other RNA
  misc_feature 1..10: note = Description of sequence: Splice site sequence
acggtatgca

SEQ ID NO: 4020 - RNA, 10 nt, synthetic construct
  source 1..10: mol_type = other RNA
  misc_feature 1..10: note = Description of sequence: Splice site sequence
taagtacctg

SEQ ID NO: 4021 - RNA, 10 nt, synthetic construct
  source 1..10: mol_type = other RNA
  misc_feature 1..10: note = Description of sequence: Splice site sequence
agggtgggct

SEQ ID NO: 4022 - RNA, 10 nt, synthetic construct
  source 1..10: mol_type = other RNA
  misc_feature 1..10: note = Description of sequence: Splice site sequence
ctggtctgtt

SEQ ID NO: 4023 - RNA, 10 nt, synthetic construct
  source 1..10: mol_type = other RNA
  misc_feature 1..10: note = Description of sequence: Splice site sequence
taggtcagag

SEQ ID NO: 4024 - RNA, 10 nt, synthetic construct
  source 1..10: mol_type = other RNA
  misc_feature 1..10: note = Description of sequence: Splice site sequence
ctggtcagtg

SEQ ID NO: 4025 - RNA, 10 nt, synthetic construct
  source 1..10: mol_type = other RNA
  misc_feature 1..10: note = Description of sequence: Splice site sequence
aaggtgggac

SEQ ID NO: 4026 - RNA, 10 nt, synthetic construct
  source 1..10: mol_type = other RNA
  misc_feature 1..10: note = Description of sequence: Splice site sequence
gtggtagtag

SEQ ID NO: 4027 - RNA, 10 nt, synthetic construct
  source 1..10: mol_type = other RNA
  misc_feature 1..10: note = Description of sequence: Splice site sequence
ctagtttagg

SEQ ID NO: 4028 - RNA, 10 nt, synthetic construct
  source 1..10: mol_type = other RNA
  misc_feature 1..10: note = Description of sequence: Splice site sequence
cccgccccat

SEQ ID NO: 4029 - RNA, 10 nt, synthetic construct
  source 1..10: mol_type = other RNA
  misc_feature 1..10: note = Description of sequence: Splice site sequence
gctgtactgc

SEQ ID NO: 4030 - RNA, 10 nt, synthetic construct
  source 1..10: mol_type = other RNA
  misc_feature 1..10: note = Description of sequence: Splice site sequence
taggttggtg

SEQ ID NO: 4031 - RNA, 10 nt, synthetic construct
  source 1..10: mol_type = other RNA
  misc_feature 1..10: note = Description of sequence: Splice site sequence
aaggtccaac

SEQ ID NO: 4032 - RNA, 10 nt, synthetic construct
  source 1..10: mol_type = other RNA
  misc_feature 1..10: note = Description of sequence: Splice site sequence
ttggcaggtg

SEQ ID NO: 4033 - RNA, 10 nt, synthetic construct
  source 1..10: mol_type = other RNA
  misc_feature 1..10: note = Description of sequence: Splice site sequence
taggttattg

SEQ ID NO: 4034 - RNA, 10 nt, synthetic construct
  source 1..10: mol_type = other RNA
  misc_feature 1..10: note = Description of sequence: Splice site sequence
gcggtgggtc

SEQ ID NO: 4035 - RNA, 10 nt, synthetic construct
  source 1..10: mol_type = other RNA
  misc_feature 1..10: note = Description of sequence: Splice site sequence
tgtgtaagat

SEQ ID NO: 4036 - RNA, 10 nt, synthetic construct
  source 1..10: mol_type = other RNA
  misc_feature 1..10: note = Description of sequence: Splice site sequence
gcagccccgg

SEQ ID NO: 4037 - RNA, 10 nt, synthetic construct
  source 1..10: mol_type = other RNA
  misc_feature 1..10: note = Description of sequence: Splice site sequence
caggtgctaa

SEQ ID NO: 4038 - RNA, 10 nt, synthetic construct
  source 1..10: mol_type = other RNA
  misc_feature 1..10: note = Description of sequence: Splice site sequence
caggtacatc

SEQ ID NO: 4039 - RNA, 10 nt, synthetic construct
  source 1..10: mol_type = other RNA
  misc_feature 1..10: note = Description of sequence: Splice site sequence
taagtaatta

SEQ ID NO: 4040 - RNA, 10 nt, synthetic construct
  source 1..10: mol_type = other RNA
  misc_feature 1..10: note = Description of sequence: Splice site sequence
taggtggttt

SEQ ID NO: 4041 - RNA, 10 nt, synthetic construct
  source 1..10: mol_type = other RNA
  misc_feature 1..10: note = Description of sequence: Splice site sequence
tgtgtaagct

SEQ ID NO: 4042 - RNA, 10 nt, synthetic construct
  source 1..10: mol_type = other RNA
  misc_feature 1..10: note = Description of sequence: Splice site sequence
gatgtaatat

SEQ ID NO: 4043 - RNA, 10 nt, synthetic construct
  source 1..10: mol_type = other RNA
  misc_feature 1..10: note = Description of sequence: Splice site sequence
ggggtaatta

SEQ ID NO: 4044 - RNA, 10 nt, synthetic construct
  source 1..10: mol_type = other RNA
  misc_feature 1..10: note = Description of sequence: Splice site sequence
taggtactac

SEQ ID NO: 4045 - RNA, 10 nt, synthetic construct
  source 1..10: mol_type = other RNA
  misc_feature 1..10: note = Description of sequence: Splice site sequence
tcggtgggtg

SEQ ID NO: 4046 - RNA, 10 nt, synthetic construct
  source 1..10: mol_type = other RNA
  misc_feature 1..10: note = Description of sequence: Splice site sequence
taagtgagcc

SEQ ID NO: 4047 - RNA, 10 nt, synthetic construct
  source 1..10: mol_type = other RNA
  misc_feature 1..10: note = Description of sequence: Splice site sequence
taggtgcgac

SEQ ID NO: 4048 - RNA, 10 nt, synthetic construct
  source 1..10: mol_type = other RNA
  misc_feature 1..10: note = Description of sequence: Splice site sequence
gaggtatggc

SEQ ID NO: 4049 - RNA, 10 nt, synthetic construct
  source 1..10: mol_type = other RNA
  misc_feature 1..10: note = Description of sequence: Splice site sequence
ttggtaacgt

SEQ ID NO: 4050 - RNA, 10 nt, synthetic construct
  source 1..10: mol_type = other RNA
  misc_feature 1..10: note = Description of sequence: Splice site sequence
gctgtaaaaa

SEQ ID NO: 4051 - RNA, 10 nt, synthetic construct
  source 1..10: mol_type = other RNA
  misc_feature 1..10: note = Description of sequence: Splice site sequence
ttggttagta

SEQ ID NO: 4052 - RNA, 10 nt, synthetic construct
  source 1..10: mol_type = other RNA
  misc_feature 1..10: note = Description of sequence: Splice site sequence
atagtaaggg

SEQ ID NO: 4053 - RNA, 10 nt, synthetic construct
  source 1..10: mol_type = other RNA
  misc_feature 1..10: note = Description of sequence: Splice site sequence
ttggtactag

SEQ ID NO: 4054 - RNA, 10 nt, synthetic construct
  source 1..10: mol_type = other RNA
  misc_feature 1..10: note = Description of sequence: Splice site sequence
cgggcagccg

SEQ ID NO: 4055 - RNA, 10 nt, synthetic construct
  source 1..10: mol_type = other RNA
  misc_feature 1..10: note = Description of sequence: Splice site sequence
caggtctggg

SEQ ID NO: 4056 - RNA, 10 nt, synthetic construct
  source 1..10: mol_type = other RNA
  misc_feature 1..10: note = Description of sequence: Splice site sequence
aaggttatta

SEQ ID NO: 4057 - RNA, 10 nt, synthetic construct
  source 1..10: mol_type = other RNA
  misc_feature 1..10: note = Description of sequence: Splice site sequence
agagtaaagc

SEQ ID NO: 4058 - RNA, 10 nt, synthetic construct
  source 1..10: mol_type = other RNA
  misc_feature 1..10: note = Description of sequence: Splice site sequence
agagtgtgag

SEQ ID NO: 4059 - RNA, 10 nt, synthetic construct
  source 1..10: mol_type = other RNA
  misc_feature 1..10: note = Description of sequence: Splice site sequence
taggtgcgag

SEQ ID NO: 4060 - RNA, 10 nt, synthetic construct
  source 1..10: mol_type = other RNA
  misc_feature 1..10: note = Description of sequence: Splice site sequence
caagtaaacg

SEQ ID NO: 4061 - RNA, 10 nt, synthetic construct
  source 1..10: mol_type = other RNA
  misc_feature 1..10: note = Description of sequence: Splice site sequence
aaggtacgta

SEQ ID NO: 4062 - RNA, 10 nt, synthetic construct
  source 1..10: mol_type = other RNA
  misc_feature 1..10: note = Description of sequence: Splice site sequence
ccagtatgta

SEQ ID NO: 4063 - RNA, 10 nt, synthetic construct
  source 1..10: mol_type = other RNA
  misc_feature 1..10: note = Description of sequence: Splice site sequence
gaggttagca

SEQ ID NO: 4064 - RNA, 10 nt, synthetic construct
  source 1..10: mol_type = other RNA
  misc_feature 1..10: note = Description of sequence: Splice site sequence
gtggtaagcc

SEQ ID NO: 4065 - RNA, 10 nt, synthetic construct
  source 1..10: mol_type = other RNA
  misc_feature 1..10: note = Description of sequence: Splice site sequence
gatgtttgtg

SEQ ID NO: 4066 - RNA, 10 nt, synthetic construct
  source 1..10: mol_type = other RNA
  misc_feature 1..10: note = Description of sequence: Splice site sequence
caggtgtcaa

SEQ ID NO: 4067 - RNA, 10 nt, synthetic construct
  source 1..10: mol_type = other RNA
  misc_feature 1..10: note = Description of sequence: Splice site sequence
caggtcacca

SEQ ID NO: 4068 - RNA, 10 nt, synthetic construct
  source 1..10: mol_type = other RNA
  misc_feature 1..10: note = Description of sequence: Splice site sequence
ccggtgagta

SEQ ID NO: 4069 - RNA, 10 nt, synthetic construct
  source 1..10: mol_type = other RNA
  misc_feature 1..10: note = Description of sequence: Splice site sequence
ttggtaaata

SEQ ID NO: 4070 - RNA, 10 nt, synthetic construct
  source 1..10: mol_type = other RNA
  misc_feature 1..10: note = Description of sequence: Splice site sequence
actgcaggtg

SEQ ID NO: 4071 - RNA, 10 nt, synthetic construct
  source 1..10: mol_type = other RNA
  misc_feature 1..10: note = Description of sequence: Splice site sequence
ggagcaagtg

SEQ ID NO: 4072 - RNA, 10 nt, synthetic construct
  source 1..10: mol_type = other RNA
  misc_feature 1..10: note = Description of sequence: Splice site sequence
tcggtgcctc

SEQ ID NO: 4073 - RNA, 10 nt, synthetic construct
  source 1..10: mol_type = other RNA
  misc_feature 1..10: note = Description of sequence: Splice site sequence
caagtaactt

SEQ ID NO: 4074 - RNA, 10 nt, synthetic construct
  source 1..10: mol_type = other RNA
  misc_feature 1..10: note = Description of sequence: Splice site sequence
ggagtaagaa

SEQ ID NO: 4075 - RNA, 10 nt, synthetic construct
  source 1..10: mol_type = other RNA
  misc_feature 1..10: note = Description of sequence: Splice site sequence
atggtgtgtc

SEQ ID NO: 4076 - RNA, 10 nt, synthetic construct
  source 1..10: mol_type = other RNA
  misc_feature 1..10: note = Description of sequence: Splice site sequence
ggggtgagta

SEQ ID NO: 4077 - RNA, 10 nt, synthetic construct
  source 1..10: mol_type = other RNA
  misc_feature 1..10: note = Description of sequence: Splice site sequence
agggtcaggt

SEQ ID NO: 4078 - RNA, 10 nt, synthetic construct
  source 1..10: mol_type = other RNA
  misc_feature 1..10: note = Description of sequence: Splice site sequence
atagtgagtt

SEQ ID NO: 4079 - RNA, 10 nt, synthetic construct
  source 1..10: mol_type = other RNA
  misc_feature 1..10: note = Description of sequence: Splice site sequence
cccgtaggct

SEQ ID NO: 4080 - RNA, 10 nt, synthetic construct
  source 1..10: mol_type = other RNA
  misc_feature 1..10: note = Description of sequence: Splice site sequence
gacgtgtgta

SEQ ID NO: 4081 - RNA, 10 nt, synthetic construct
  source 1..10: mol_type = other RNA
  misc_feature 1..10: note = Description of sequence: Splice site sequence
gcggtgagga

SEQ ID NO: 4082 - RNA, 10 nt, synthetic construct
  source 1..10: mol_type = other RNA
  misc_feature 1..10: note = Description of sequence: Splice site sequence
taagtttagt

SEQ ID NO: 4083 - RNA, 10 nt, synthetic construct
  source 1..10: mol_type = other RNA
  misc_feature 1..10: note = Description of sequence: Splice site sequence
cgggtagagg

SEQ ID NO: 4084 - RNA, 10 nt, synthetic construct
  source 1..10: mol_type = other RNA
  misc_feature 1..10: note = Description of sequence: Splice site sequence
gaggtggggt

SEQ ID NO: 4085 - RNA, 10 nt, synthetic construct
  source 1..10: mol_type = other RNA
  misc_feature 1..10: note = Description of sequence: Splice site sequence
cacgtgggtt

SEQ ID NO: 4086 - RNA, 10 nt, synthetic construct
  source 1..10: mol_type = other RNA
  misc_feature 1..10: note = Description of sequence: Splice site sequence
acggtaattg

SEQ ID NO: 4087 - RNA, 10 nt, synthetic construct
  source 1..10: mol_type = other RNA
  misc_feature 1..10: note = Description of sequence: Splice site sequence
ttggctccaa

SEQ ID NO: 4088 - RNA, 10 nt, synthetic construct
  source 1..10: mol_type = other RNA
  misc_feature 1..10: note = Description of sequence: Splice site sequence
agcgtaagtt

SEQ ID NO: 4089 - RNA, 10 nt, synthetic construct
  source 1..10: mol_type = other RNA
  misc_feature 1..10: note = Description of sequence: Splice site sequence
tcagttaagt

SEQ ID NO: 4090 - RNA, 10 nt, synthetic construct
  source 1..10: mol_type = other RNA
  misc_feature 1..10: note = Description of sequence: Splice site sequence
caagtacgtg

SEQ ID NO: 4091 - RNA, 10 nt, synthetic construct
  source 1..10: mol_type = other RNA
  misc_feature 1..10: note = Description of sequence: Splice site sequence
atggtggggt

SEQ ID NO: 4092 - RNA, 10 nt, synthetic construct
  source 1..10: mol_type = other RNA
  misc_feature 1..10: note = Description of sequence: Splice site sequence
caggtaatca

SEQ ID NO: 4093 - RNA, 10 nt, synthetic construct
  source 1..10: mol_type = other RNA
  misc_feature 1..10: note = Description of sequence: Splice site sequence
caggccaagg

SEQ ID NO: 4094 - RNA, 10 nt, synthetic construct
  source 1..10: mol_type = other RNA
  misc_feature 1..10: note = Description of sequence: Splice site sequence
gtggtgagag

SEQ ID NO: 4095 - RNA, 10 nt, synthetic construct
  source 1..10: mol_type = other RNA
  misc_feature 1..10: note = Description of sequence: Splice site sequence
taggcatgtg

SEQ ID NO: 4096 - RNA, 10 nt, synthetic construct
  source 1..10: mol_type = other RNA
  misc_feature 1..10: note = Description of sequence: Splice site sequence
ttggtacctt

SEQ ID NO: 4097 - RNA, 10 nt, synthetic construct
  source 1..10: mol_type = other RNA
  misc_feature 1..10: note = Description of sequence: Splice site sequence
ctggtgtgcc

SEQ ID NO: 4098 - RNA, 10 nt, synthetic construct
  source 1..10: mol_type = other RNA
  misc_feature 1..10: note = Description of sequence: Splice site sequence
acagttgcca

SEQ ID NO: 4099 - RNA, 10 nt, synthetic construct
  source 1..10: mol_type = other RNA
  misc_feature 1..10: note = Description of sequence: Splice site sequence
ttggtaatat

SEQ ID NO: 4100 - RNA, 10 nt, synthetic construct
  source 1..10: mol_type = other RNA
  misc_feature 1..10: note = Description of sequence: Splice site sequence
gaggtgcatg

SEQ ID NO: 4101 - RNA, 10 nt, synthetic construct
  source 1..10: mol_type = other RNA
  misc_feature 1..10: note = Description of sequence: Splice site sequence
tgtgtgtgtg

SEQ ID NO: 4102 - RNA, 10 nt, synthetic construct
  source 1..10: mol_type = other RNA
  misc_feature 1..10: note = Description of sequence: Splice site sequence
gcggtacaca

SEQ ID NO: 4103 - RNA, 10 nt, synthetic construct
  source 1..10: mol_type = other RNA
  misc_feature 1..10: note = Description of sequence: Splice site sequence
agagtatgct

SEQ ID NO: 4104 - RNA, 10 nt, synthetic construct
  source 1..10: mol_type = other RNA
  misc_feature 1..10: note = Description of sequence: Splice site sequence
tctgtgcggg

SEQ ID NO: 4105 - RNA, 10 nt, synthetic construct
  source 1..10: mol_type = other RNA
  misc_feature 1..10: note = Description of sequence: Splice site sequence
gcggttagca

SEQ ID NO: 4106 - RNA, 10 nt, synthetic construct
  source 1..10: mol_type = other RNA
  misc_feature 1..10: note = Description of sequence: Splice site sequence
gaagtgagta

SEQ ID NO: 4107 - RNA, 10 nt, synthetic construct
  source 1..10: mol_type = other RNA
  misc_feature 1..10: note = Description of sequence: Splice site sequence
caggtgacag

SEQ ID NO: 4108 - RNA, 10 nt, synthetic construct
  source 1..10: mol_type = other RNA
  misc_feature 1..10: note = Description of sequence: Splice site sequence
gaggccagcc

SEQ ID NO: 4109 - RNA, 10 nt, synthetic construct
  source 1..10: mol_type = other RNA
  misc_feature 1..10: note = Description of sequence: Splice site sequence
gaggtctcct

SEQ ID NO: 4110 - RNA, 10 nt, synthetic construct
  source 1..10: mol_type = other RNA
  misc_feature 1..10: note = Description of sequence: Splice site sequence
ctggtagggc

SEQ ID NO: 4111 - RNA, 10 nt, synthetic construct
  source 1..10: mol_type = other RNA
  misc_feature 1..10: note = Description of sequence: Splice site sequence
cgggtaagtg

SEQ ID NO: 4112 - RNA, 10 nt, synthetic construct
  source 1..10: mol_type = other RNA
  misc_feature 1..10: note = Description of sequence: Splice site sequence
caggtaatct

SEQ ID NO: 4113 - RNA, 10 nt, synthetic construct
  source 1..10: mol_type = other RNA
  misc_feature 1..10: note = Description of sequence: Splice site sequence
gtggtaggta

SEQ ID NO: 4114 - RNA, 10 nt, synthetic construct
  source 1..10: mol_type = other RNA
  misc_feature 1..10: note = Description of sequence: Splice site sequence
aaggccagtg

SEQ ID NO: 4115 - RNA, 10 nt, synthetic construct
  source 1..10: mol_type = other RNA
  misc_feature 1..10: note = Description of sequence: Splice site sequence
aaagtgaatc

SEQ ID NO: 4116 - RNA, 10 nt, synthetic construct
  source 1..10: mol_type = other RNA
  misc_feature 1..10: note = Description of sequence: Splice site sequence
acggttacgt

SEQ ID NO: 4117 - RNA, 10 nt, synthetic construct
  source 1..10: mol_type = other RNA
  misc_feature 1..10: note = Description of sequence: Splice site sequence
cgggtgagac

SEQ ID NO: 4118 - RNA, 10 nt, synthetic construct
  source 1..10: mol_type = other RNA
  misc_feature 1..10: note = Description of sequence: Splice site sequence
ctagtacgag

SEQ ID NO: 4119 - RNA, 10 nt, synthetic construct
  source 1..10: mol_type = other RNA
  misc_feature 1..10: note = Description of sequence: Splice site sequence
gctgtgaggt

SEQ ID NO: 4120 - RNA, 10 nt, synthetic construct
  source 1..10: mol_type = other RNA
  misc_feature 1..10: note = Description of sequence: Splice site sequence
ctggtatgaa

SEQ ID NO: 4121 - RNA, 10 nt, synthetic construct
  source 1..10: mol_type = other RNA
  misc_feature 1..10: note = Description of sequence: Splice site sequence
ggtgtacgac

SEQ ID NO: 4122 - RNA, 10 nt, synthetic construct
  source 1..10: mol_type = other RNA
  misc_feature 1..10: note = Description of sequence: Splice site sequence
cttgtgagtg

SEQ ID NO: 4123 - RNA, 10 nt, synthetic construct
  source 1..10: mol_type = other RNA
  misc_feature 1..10: note = Description of sequence: Splice site sequence
tcggtgagga

SEQ ID NO: 4124 - RNA, 10 nt, synthetic construct
  source 1..10: mol_type = other RNA
  misc_feature 1..10: note = Description of sequence: Splice site sequence
tgggtaaaca

SEQ ID NO: 4125 - RNA, 10 nt, synthetic construct
  source 1..10: mol_type = other RNA
  misc_feature 1..10: note = Description of sequence: Splice site sequence
tcggtacgtg

SEQ ID NO: 4126 - RNA, 10 nt, synthetic construct
  source 1..10: mol_type = other RNA
  misc_feature 1..10: note = Description of sequence: Splice site sequence
taggtagcag

SEQ ID NO: 4127 - RNA, 10 nt, synthetic construct
  source 1..10: mol_type = other RNA
  misc_feature 1..10: note = Description of sequence: Splice site sequence
gaggttccaa

SEQ ID NO: 4128 - RNA, 10 nt, synthetic construct
  source 1..10: mol_type = other RNA
  misc_feature 1..10: note = Description of sequence: Splice site sequence
ctggtatgga

SEQ ID NO: 4129 - RNA, 10 nt, synthetic construct
  source 1..10: mol_type = other RNA
  misc_feature 1..10: note = Description of sequence: Splice site sequence
caggtttccc

SEQ ID NO: 4130 - RNA, 10 nt, synthetic construct
  source 1..10: mol_type = other RNA
  misc_feature 1..10: note = Description of sequence: Splice site sequence
caggtctctg

SEQ ID NO: 4131 - RNA, 10 nt, synthetic construct
  source 1..10: mol_type = other RNA
  misc_feature 1..10: note = Description of sequence: Splice site sequence
gcggtagggg

SEQ ID NO: 4132 - RNA, 10 nt, synthetic construct
  source 1..10: mol_type = other RNA
  misc_feature 1..10: note = Description of sequence: Splice site sequence
gttgtttccc

SEQ ID NO: 4133 - RNA, 10 nt, synthetic construct
  source 1..10: mol_type = other RNA
  misc_feature 1..10: note = Description of sequence: Splice site sequence
aaagcatcca

SEQ ID NO: 4134 - RNA, 10 nt, synthetic construct
  source 1..10: mol_type = other RNA
  misc_feature 1..10: note = Description of sequence: Splice site sequence
aaggtgctca

SEQ ID NO: 4135 - RNA, 10 nt, synthetic construct
  source 1..10: mol_type = other RNA
  misc_feature 1..10: note = Description of sequence: Splice site sequence
aaggttcaac

SEQ ID NO: 4136 - RNA, 10 nt, synthetic construct
  source 1..10: mol_type = other RNA
  misc_feature 1..10: note = Description of sequence: Splice site sequence
caggtttaca

SEQ ID NO: 4137 - RNA, 10 nt, synthetic construct
  source 1..10: mol_type = other RNA
  misc_feature 1..10: note = Description of sequence: Splice site sequence
taggtaagaa

SEQ ID NO: 4138 - RNA, 10 nt, synthetic construct
  source 1..10: mol_type = other RNA
  misc_feature 1..10: note = Description of sequence: Splice site sequence
agggtatcct

SEQ ID NO: 4139 - RNA, 10 nt, synthetic construct
  source 1..10: mol_type = other RNA
  misc_feature 1..10: note = Description of sequence: Splice site sequence
gtggtaatat

SEQ ID NO: 4140 - RNA, 10 nt, synthetic construct
  source 1..10: mol_type = other RNA
  misc_feature 1..10: note = Description of sequence: Splice site sequence
tgggtatgga

SEQ ID NO: 4141 - RNA, 10 nt, synthetic construct
  source 1..10: mol_type = other RNA
  misc_feature 1..10: note = Description of sequence: Splice site sequence
ctggtttggc

SEQ ID NO: 4142 - RNA, 10 nt, synthetic construct
  source 1..10: mol_type = other RNA
  misc_feature 1..10: note = Description of sequence: Splice site sequence
atggtatatc

SEQ ID NO: 4143 - RNA, 10 nt, synthetic construct
  source 1..10: mol_type = other RNA
  misc_feature 1..10: note = Description of sequence: Splice site sequence
aaagtaaact

SEQ ID NO: 4144 - RNA, 10 nt, synthetic construct
  source 1..10: mol_type = other RNA
  misc_feature 1..10: note = Description of sequence: Splice site sequence
ctggtataga

SEQ ID NO: 4145 - RNA, 10 nt, synthetic construct
  source 1..10: mol_type = other RNA
  misc_feature 1..10: note = Description of sequence: Splice site sequence
taggtacttg

SEQ ID NO: 4146 - RNA, 10 nt, synthetic construct
  source 1..10: mol_type = other RNA
  misc_feature 1..10: note = Description of sequence: Splice site sequence
gcagtaggtg

SEQ ID NO: 4147 - RNA, 10 nt, synthetic construct
  source 1..10: mol_type = other RNA
  misc_feature 1..10: note = Description of sequence: Splice site sequence
agtgtatgtc

SEQ ID NO: 4148 - RNA, 10 nt, synthetic construct
  source 1..10: mol_type = other RNA
  misc_feature 1..10: note = Description of sequence: Splice site sequence
ctggtggcct

SEQ ID NO: 4149 - RNA, 10 nt, synthetic construct
  source 1..10: mol_type = other RNA
  misc_feature 1..10: note = Description of sequence: Splice site sequence
ttggtgtaag

SEQ ID NO: 4150 - RNA, 10 nt, synthetic construct
  source 1..10: mol_type = other RNA
  misc_feature 1..10: note = Description of sequence: Splice site sequence
cgggtctcgg

SEQ ID NO: 4151 - RNA, 10 nt, synthetic construct
  source 1..10: mol_type = other RNA
  misc_feature 1..10: note = Description of sequence: Splice site sequence
ctcgttagtt

SEQ ID NO: 4152 - RNA, 10 nt, synthetic construct
  source 1..10: mol_type = other RNA
  misc_feature 1..10: note = Description of sequence: Splice site sequence
caggtggtca

SEQ ID NO: 4153 - RNA, 10 nt, synthetic construct
  source 1..10: mol_type = other RNA
  misc_feature 1..10: note = Description of sequence: Splice site sequence
acggtaagtc

SEQ ID NO: 4154 - RNA, 10 nt, synthetic construct
  source 1..10: mol_type = other RNA
  misc_feature 1..10: note = Description of sequence: Splice site sequence
acagtaatgt

SEQ ID NO: 4155 - RNA, 10 nt, synthetic construct
  source 1..10: mol_type = other RNA
  misc_feature 1..10: note = Description of sequence: Splice site sequence
cctgtaaggt

SEQ ID NO: 4156 - RNA, 10 nt, synthetic construct
  source 1..10: mol_type = other RNA
  misc_feature 1..10: note = Description of sequence: Splice site sequence
gaggttaagt

SEQ ID NO: 4157 - RNA, 10 nt, synthetic construct
  source 1..10: mol_type = other RNA
  misc_feature 1..10: note = Description of sequence: Splice site sequence
ttggtaaaca

SEQ ID NO: 4158 - RNA, 10 nt, synthetic construct
  source 1..10: mol_type = other RNA
  misc_feature 1..10: note = Description of sequence: Splice site sequence
aaggtagtgt

SEQ ID NO: 4159 - RNA, 10 nt, synthetic construct
  source 1..10: mol_type = other RNA
  misc_feature 1..10: note = Description of sequence: Splice site sequence
gaggtgtggc

SEQ ID NO: 4160 - RNA, 10 nt, synthetic construct
  source 1..10: mol_type = other RNA
  misc_feature 1..10: note = Description of sequence: Splice site sequence
caggtacgga

SEQ ID NO: 4161 - RNA, 10 nt, synthetic construct
  source 1..10: mol_type = other RNA
  misc_feature 1..10: note = Description of sequence: Splice site sequence
aaggtcatca

SEQ ID NO: 4162 - RNA, 10 nt, synthetic construct
  source 1..10: mol_type = other RNA
  misc_feature 1..10: note = Description of sequence: Splice site sequence
caagtaggca

SEQ ID NO: 4163 - RNA, 10 nt, synthetic construct
  source 1..10: mol_type = other RNA
  misc_feature 1..10: note = Description of sequence: Splice site sequence
caggtgaaac

SEQ ID NO: 4164 - RNA, 10 nt, synthetic construct
  source 1..10: mol_type = other RNA
  misc_feature 1..10: note = Description of sequence: Splice site sequence
aatgcaagtg

SEQ ID NO: 4165 - RNA, 10 nt, synthetic construct
  source 1..10: mol_type = other RNA
  misc_feature 1..10: note = Description of sequence: Splice site sequence
catgtaattc

SEQ ID NO: 4166 - RNA, 10 nt, synthetic construct
  source 1..10: mol_type = other RNA
  misc_feature 1..10: note = Description of sequence: Splice site sequence
caggtggttt

SEQ ID NO: 4167 - RNA, 10 nt, synthetic construct
  source 1..10: mol_type = other RNA
  misc_feature 1..10: note = Description of sequence: Splice site sequence
aaggtcggtg

SEQ ID NO: 4168 - RNA, 10 nt, synthetic construct
  source 1..10: mol_type = other RNA
  misc_feature 1..10: note = Description of sequence: Splice site sequence
agtgtatgga

SEQ ID NO: 4169 - RNA, 10 nt, synthetic construct
  source 1..10: mol_type = other RNA
  misc_feature 1..10: note = Description of sequence: Splice site sequence
aacgtaagat

SEQ ID NO: 4170 - RNA, 10 nt, synthetic construct
  source 1..10: mol_type = other RNA
  misc_feature 1..10: note = Description of sequence: Splice site sequence
gtggtaaggt

SEQ ID NO: 4171 - RNA, 10 nt, synthetic construct
  source 1..10: mol_type = other RNA
  misc_feature 1..10: note = Description of sequence: Splice site sequence
actgttagta

SEQ ID NO: 4172 - RNA, 10 nt, synthetic construct
  source 1..10: mol_type = other RNA
  misc_feature 1..10: note = Description of sequence: Splice site sequence
ttggtgagct

SEQ ID NO: 4173 - RNA, 10 nt, synthetic construct
  source 1..10: mol_type = other RNA
  misc_feature 1..10: note = Description of sequence: Splice site sequence
tgtgtacgta

SEQ ID NO: 4174 - RNA, 10 nt, synthetic construct
  source 1..10: mol_type = other RNA
  misc_feature 1..10: note = Description of sequence: Splice site sequence
gaggtcagcc

SEQ ID NO: 4175 - RNA, 10 nt, synthetic construct
  source 1..10: mol_type = other RNA
  misc_feature 1..10: note = Description of sequence: Splice site sequence
gaggtagaat

SEQ ID NO: 4176 - RNA, 10 nt, synthetic construct
  source 1..10: mol_type = other RNA
  misc_feature 1..10: note = Description of sequence: Splice site sequence
tgtgtaacac

SEQ ID NO: 4177 - RNA, 10 nt, synthetic construct
  source 1..10: mol_type = other RNA
  misc_feature 1..10: note = Description of sequence: Splice site sequence
agtgtaaggc

SEQ ID NO: 4178 - RNA, 10 nt, synthetic construct
  source 1..10: mol_type = other RNA
  misc_feature 1..10: note = Description of sequence: Splice site sequence
gaggtctgct

SEQ ID NO: 4179 - RNA, 10 nt, synthetic construct
  source 1..10: mol_type = other RNA
  misc_feature 1..10: note = Description of sequence: Splice site sequence
aacgtaagct

SEQ ID NO: 4180 - RNA, 10 nt, synthetic construct
  source 1..10: mol_type = other RNA
  misc_feature 1..10: note = Description of sequence: Splice site sequence
caggtctgca

SEQ ID NO: 4181 - RNA, 10 nt, synthetic construct
  source 1..10: mol_type = other RNA
  misc_feature 1..10: note = Description of sequence: Splice site sequence
gccgtgagcc

SEQ ID NO: 4182 - RNA, 10 nt, synthetic construct
  source 1..10: mol_type = other RNA
  misc_feature 1..10: note = Description of sequence: Splice site sequence
caggcaactt

SEQ ID NO: 4183 - RNA, 10 nt, synthetic construct
  source 1..10: mol_type = other RNA
  misc_feature 1..10: note = Description of sequence: Splice site sequence
caggtgcgct

SEQ ID NO: 4184 - RNA, 10 nt, synthetic construct
  source 1..10: mol_type = other RNA
  misc_feature 1..10: note = Description of sequence: Splice site sequence
cgggtaaacc

SEQ ID NO: 4185 - RNA, 10 nt, synthetic construct
  source 1..10: mol_type = other RNA
  misc_feature 1..10: note = Description of sequence: Splice site sequence
ccggtcagtc

SEQ ID NO: 4186 - RNA, 10 nt, synthetic construct
  source 1..10: mol_type = other RNA
  misc_feature 1..10: note = Description of sequence: Splice site sequence
taggtgggcg

SEQ ID NO: 4187 - RNA, 10 nt, synthetic construct
  source 1..10: mol_type = other RNA
  misc_feature 1..10: note = Description of sequence: Splice site sequence
gcggtcagtt

SEQ ID NO: 4188 - RNA, 10 nt, synthetic construct
  source 1..10: mol_type = other RNA
  misc_feature 1..10: note = Description of sequence: Splice site sequence
ggggtgggtc

SEQ ID NO: 4189 - RNA, 10 nt, synthetic construct
  source 1..10: mol_type = other RNA
  misc_feature 1..10: note = Description of sequence: Splice site sequence
agcgtaatag

SEQ ID NO: 4190 - RNA, 10 nt, synthetic construct
  source 1..10: mol_type = other RNA
  misc_feature 1..10: note = Description of sequence: Splice site sequence
acggtgagtc

SEQ ID NO: 4191 - RNA, 10 nt, synthetic construct
  source 1..10: mol_type = other RNA
  misc_feature 1..10: note = Description of sequence: Splice site sequence
caggttggta

SEQ ID NO: 4192 - RNA, 10 nt, synthetic construct
  source 1..10: mol_type = other RNA
  misc_feature 1..10: note = Description of sequence: Splice site sequence
gaggtggctt

SEQ ID NO: 4193 - RNA, 10 nt, synthetic construct
  source 1..10: mol_type = other RNA
  misc_feature 1..10: note = Description of sequence: Splice site sequence
atagtattga

SEQ ID NO: 4194 - RNA, 10 nt, synthetic construct
  source 1..10: mol_type = other RNA
  misc_feature 1..10: note = Description of sequence: Splice site sequence
tgagtcgtcc

SEQ ID NO: 4195 - RNA, 10 nt, synthetic construct
  source 1..10: mol_type = other RNA
  misc_feature 1..10: note = Description of sequence: Splice site sequence
caggtgctct

SEQ ID NO: 4196 - RNA, 10 nt, synthetic construct
  source 1..10: mol_type = other RNA
  misc_feature 1..10: note = Description of sequence: Splice site sequence
tacgtaatat

SEQ ID NO: 4197 - RNA, 10 nt, synthetic construct
  source 1..10: mol_type = other RNA
  misc_feature 1..10: note = Description of sequence: Splice site sequence
gctgtcctga

SEQ ID NO: 4198 - RNA, 10 nt, synthetic construct
  source 1..10: mol_type = other RNA
  misc_feature 1..10: note = Description of sequence: Splice site sequence
caggctgcac

SEQ ID NO: 4199 - RNA, 10 nt, synthetic construct
  source 1..10: mol_type = other RNA
  misc_feature 1..10: note = Description of sequence: Splice site sequence
gcggtaagaa

SEQ ID NO: 4200 - RNA, 10 nt, synthetic construct
  source 1..10: mol_type = other RNA
  misc_feature 1..10: note = Description of sequence: Splice site sequence
taagttactt

SEQ ID NO: 4201 - RNA, 10 nt, synthetic construct
  source 1..10: mol_type = other RNA
  misc_feature 1..10: note = Description of sequence: Splice site sequence
taagtaaata

SEQ ID NO: 4202 - RNA, 10 nt, synthetic construct
  source 1..10: mol_type = other RNA
  misc_feature 1..10: note = Description of sequence: Splice site sequence
ggggtataac

SEQ ID NO: 4203 - RNA, 10 nt, synthetic construct
  source 1..10: mol_type = other RNA
  misc_feature 1..10: note = Description of sequence: Splice site sequence
gaggtgcatt

SEQ ID NO: 4204 - RNA, 10 nt, synthetic construct
  source 1..10: mol_type = other RNA
  misc_feature 1..10: note = Description of sequence: Splice site sequence
tcggtaatgt

SEQ ID NO: 4205 - RNA, 10 nt, synthetic construct
  source 1..10: mol_type = other RNA
  misc_feature 1..10: note = Description of sequence: Splice site sequence
gaggcacgga

SEQ ID NO: 4206 - RNA, 10 nt, synthetic construct
  source 1..10: mol_type = other RNA
  misc_feature 1..10: note = Description of sequence: Splice site sequence
agggtgtgga

SEQ ID NO: 4207 - RNA, 10 nt, synthetic construct
  source 1..10: mol_type = other RNA
  misc_feature 1..10: note = Description of sequence: Splice site sequence
tgggtatatg

SEQ ID NO: 4208 - RNA, 10 nt, synthetic construct
  source 1..10: mol_type = other RNA
  misc_feature 1..10: note = Description of sequence: Splice site sequence
tgagtgagac

SEQ ID NO: 4209 - RNA, 10 nt, synthetic construct
  source 1..10: mol_type = other RNA
  misc_feature 1..10: note = Description of sequence: Splice site sequence
aaggcaaagg

SEQ ID NO: 4210 - RNA, 10 nt, synthetic construct
  source 1..10: mol_type = other RNA
  misc_feature 1..10: note = Description of sequence: Splice site sequence
agtgtttgtt

SEQ ID NO: 4211 - RNA, 10 nt, synthetic construct
  source 1..10: mol_type = other RNA
  misc_feature 1..10: note = Description of sequence: Splice site sequence
atggtattgg

SEQ ID NO: 4212 - RNA, 10 nt, synthetic construct
  source 1..10: mol_type = other RNA
  misc_feature 1..10: note = Description of sequence: Splice site sequence
caggtgctgt

SEQ ID NO: 4213 - RNA, 10 nt, synthetic construct
  source 1..10: mol_type = other RNA
  misc_feature 1..10: note = Description of sequence: Splice site sequence
gaggtccgcg

SEQ ID NO: 4214 - RNA, 10 nt, synthetic construct
  source 1..10: mol_type = other RNA
  misc_feature 1..10: note = Description of sequence: Splice site sequence
atggcaagct

SEQ ID NO: 4215 - RNA, 10 nt, synthetic construct
  source 1..10: mol_type = other RNA
  misc_feature 1..10: note = Description of sequence: Splice site sequence
tcggtaatat

SEQ ID NO: 4216 - RNA, 10 nt, synthetic construct
  source 1..10: mol_type = other RNA
  misc_feature 1..10: note = Description of sequence: Splice site sequence
caggcaacaa

SEQ ID NO: 4217 - RNA, 10 nt, synthetic construct
  source 1..10: mol_type = other RNA
  misc_feature 1..10: note = Description of sequence: Splice site sequence
ctggtctcgc

SEQ ID NO: 4218 - RNA, 10 nt, synthetic construct
  source 1..10: mol_type = other RNA
  misc_feature 1..10: note = Description of sequence: Splice site sequence
taggtaacga

SEQ ID NO: 4219 - RNA, 10 nt, synthetic construct
  source 1..10: mol_type = other RNA
  misc_feature 1..10: note = Description of sequence: Splice site sequence
cgggtaaggt

SEQ ID NO: 4220 - RNA, 10 nt, synthetic construct
  source 1..10: mol_type = other RNA
  misc_feature 1..10: note = Description of sequence: Splice site sequence
taggtaatgc

SEQ ID NO: 4221 - RNA, 10 nt, synthetic construct
  source 1..10: mol_type = other RNA
  misc_feature 1..10: note = Description of sequence: Splice site sequence
acagtaggta

SEQ ID NO: 4222 - RNA, 10 nt, synthetic construct
  source 1..10: mol_type = other RNA
  misc_feature 1..10: note = Description of sequence: Splice site sequence
gctgttcgaa

SEQ ID NO: 4223 - RNA, 10 nt, synthetic construct
  source 1..10: mol_type = other RNA
  misc_feature 1..10: note = Description of sequence: Splice site sequence
aaggttatgc

SEQ ID NO: 4224 - RNA, 10 nt, synthetic construct
  source 1..10: mol_type = other RNA
  misc_feature 1..10: note = Description of sequence: Splice site sequence
agagttagtt

SEQ ID NO: 4225 - RNA, 10 nt, synthetic construct
  source 1..10: mol_type = other RNA
  misc_feature 1..10: note = Description of sequence: Splice site sequence
tgagtgtgcg

SEQ ID NO: 4226 - RNA, 10 nt, synthetic construct
  source 1..10: mol_type = other RNA
  misc_feature 1..10: note = Description of sequence: Splice site sequence
catgtgcttt

SEQ ID NO: 4227 - RNA, 10 nt, synthetic construct
  source 1..10: mol_type = other RNA
  misc_feature 1..10: note = Description of sequence: Splice site sequence
agggtgtgtt

SEQ ID NO: 4228 - RNA, 10 nt, synthetic construct
  source 1..10: mol_type = other RNA
  misc_feature 1..10: note = Description of sequence: Splice site sequence
acagttaagg

SEQ ID NO: 4229 - RNA, 10 nt, synthetic construct
  source 1..10: mol_type = other RNA
  misc_feature 1..10: note = Description of sequence: Splice site sequence
acagtgaggg

SEQ ID NO: 4230 - RNA, 10 nt, synthetic construct
  source 1..10: mol_type = other RNA
  misc_feature 1..10: note = Description of sequence: Splice site sequence
gatgtatacc

SEQ ID NO: 4231 - RNA, 10 nt, synthetic construct
  source 1..10: mol_type = other RNA
  misc_feature 1..10: note = Description of sequence: Splice site sequence
ttagtaagct

SEQ ID NO: 4232 - RNA, 10 nt, synthetic construct
  source 1..10: mol_type = other RNA
  misc_feature 1..10: note = Description of sequence: Splice site sequence
agagctgcgt

SEQ ID NO: 4233 - RNA, 10 nt, synthetic construct
  source 1..10: mol_type = other RNA
  misc_feature 1..10: note = Description of sequence: Splice site sequence
aaggtgaaaa

SEQ ID NO: 4234 - RNA, 10 nt, synthetic construct
  source 1..10: mol_type = other RNA
  misc_feature 1..10: note = Description of sequence: Splice site sequence
aaggtaccta

SEQ ID NO: 4235 - RNA, 10 nt, synthetic construct
  source 1..10: mol_type = other RNA
  misc_feature 1..10: note = Description of sequence: Splice site sequence
gaggtatcag

SEQ ID NO: 4236 - RNA, 10 nt, synthetic construct
  source 1..10: mol_type = other RNA
  misc_feature 1..10: note = Description of sequence: Splice site sequence
atggtatgta

SEQ ID NO: 4237 - RNA, 10 nt, synthetic construct
  source 1..10: mol_type = other RNA
  misc_feature 1..10: note = Description of sequence: Splice site sequence
ttggtgagcc

SEQ ID NO: 4238 - RNA, 10 nt, synthetic construct
  source 1..10: mol_type = other RNA
  misc_feature 1..10: note = Description of sequence: Splice site sequence
caggtaccga

SEQ ID NO: 4239 - RNA, 10 nt, synthetic construct
  source 1..10: mol_type = other RNA
  misc_feature 1..10: note = Description of sequence: Splice site sequence
agagtaaact

SEQ ID NO: 4240 - RNA, 10 nt, synthetic construct
  source 1..10: mol_type = other RNA
  misc_feature 1..10: note = Description of sequence: Splice site sequence
aaggtgcata

SEQ ID NO: 4241 - RNA, 10 nt, synthetic construct
  source 1..10: mol_type = other RNA
  misc_feature 1..10: note = Description of sequence: Splice site sequence
ccggtgtgtg

SEQ ID NO: 4242 - RNA, 10 nt, synthetic construct
  source 1..10: mol_type = other RNA
  misc_feature 1..10: note = Description of sequence: Splice site sequence
ggggtttggc

SEQ ID NO: 4243 - RNA, 10 nt, synthetic construct
  source 1..10: mol_type = other RNA
  misc_feature 1..10: note = Description of sequence: Splice site sequence
ttggtaacca

SEQ ID NO: 4244 - RNA, 10 nt, synthetic construct
  source 1..10: mol_type = other RNA
  misc_feature 1..10: note = Description of sequence: Splice site sequence
tctgttggta

SEQ ID NO: 4245 - RNA, 10 nt, synthetic construct
  source 1..10: mol_type = other RNA
  misc_feature 1..10: note = Description of sequence: Splice site sequence
ttggtatgtc

SEQ ID NO: 4246 - RNA, 10 nt, synthetic construct
  source 1..10: mol_type = other RNA
  misc_feature 1..10: note = Description of sequence: Splice site sequence
aaggtgcgtc

SEQ ID NO: 4247 - RNA, 10 nt, synthetic construct
  source 1..10: mol_type = other RNA
  misc_feature 1..10: note = Description of sequence: Splice site sequence
tttgtaagcc

SEQ ID NO: 4248 - RNA, 10 nt, synthetic construct
  source 1..10: mol_type = other RNA
  misc_feature 1..10: note = Description of sequence: Splice site sequence
ctggtaaact

SEQ ID NO: 4249 - RNA, 10 nt, synthetic construct
  source 1..10: mol_type = other RNA
  misc_feature 1..10: note = Description of sequence: Splice site sequence
tcggtaattt

SEQ ID NO: 4250 - RNA, 10 nt, synthetic construct
  source 1..10: mol_type = other RNA
  misc_feature 1..10: note = Description of sequence: Splice site sequence
ctggtaggct

SEQ ID NO: 4251 - RNA, 10 nt, synthetic construct
  source 1..10: mol_type = other RNA
  misc_feature 1..10: note = Description of sequence: Splice site sequence
gaggtctgta

SEQ ID NO: 4252 - RNA, 10 nt, synthetic construct
  source 1..10: mol_type = other RNA
  misc_feature 1..10: note = Description of sequence: Splice site sequence
ctggtaaagg

SEQ ID NO: 4253 - RNA, 10 nt, synthetic construct
  source 1..10: mol_type = other RNA
  misc_feature 1..10: note = Description of sequence: Splice site sequence
caggtgtggt

SEQ ID NO: 4254 - RNA, 10 nt, synthetic construct
  source 1..10: mol_type = other RNA
  misc_feature 1..10: note = Description of sequence: Splice site sequence
tcggtacgtc

SEQ ID NO: 4255 - RNA, 10 nt, synthetic construct
  source 1..10: mol_type = other RNA
  misc_feature 1..10: note = Description of sequence: Splice site sequence
caggtgccag

SEQ ID NO: 4256 - RNA, 10 nt, synthetic construct
  source 1..10: mol_type = other RNA
  misc_feature 1..10: note = Description of sequence: Splice site sequence
acagctagta

SEQ ID NO: 4257 - RNA, 10 nt, synthetic construct
  source 1..10: mol_type = other RNA
  misc_feature 1..10: note = Description of sequence: Splice site sequence
aaggtatagc

SEQ ID NO: 4258 - RNA, 10 nt, synthetic construct
  source 1..10: mol_type = other RNA
  misc_feature 1..10: note = Description of sequence: Splice site sequence
ctggtaggag

SEQ ID NO: 4259 - RNA, 10 nt, synthetic construct
  source 1..10: mol_type = other RNA
  misc_feature 1..10: note = Description of sequence: Splice site sequence
gctgtacgta

SEQ ID NO: 4260 - RNA, 10 nt, synthetic construct
  source 1..10: mol_type = other RNA
  misc_feature 1..10: note = Description of sequence: Splice site sequence
caagcacgag

SEQ ID NO: 4261 - RNA, 10 nt, synthetic construct
  source 1..10: mol_type = other RNA
  misc_feature 1..10: note = Description of sequence: Splice site sequence
ctagtaagac

SEQ ID NO: 4262 - RNA, 10 nt, synthetic construct
  source 1..10: mol_type = other RNA
  misc_feature 1..10: note = Description of sequence: Splice site sequence
cccgtaagcg

SEQ ID NO: 4263 - RNA, 10 nt, synthetic construct
  source 1..10: mol_type = other RNA
  misc_feature 1..10: note = Description of sequence: Splice site sequence
gaggtccagg

SEQ ID NO: 4264 - RNA, 10 nt, synthetic construct
  source 1..10: mol_type = other RNA
  misc_feature 1..10: note = Description of sequence: Splice site sequence
aaggtggggc

SEQ ID NO: 4265 - RNA, 10 nt, synthetic construct
  source 1..10: mol_type = other RNA
  misc_feature 1..10: note = Description of sequence: Splice site sequence
caggtaaacg

SEQ ID NO: 4266 - RNA, 10 nt, synthetic construct
  source 1..10: mol_type = other RNA
  misc_feature 1..10: note = Description of sequence: Splice site sequence
tcggtaactt

SEQ ID NO: 4267 - RNA, 10 nt, synthetic construct
  source 1..10: mol_type = other RNA
  misc_feature 1..10: note = Description of sequence: Splice site sequence
gaggtgcgca

SEQ ID NO: 4268 - RNA, 10 nt, synthetic construct
  source 1..10: mol_type = other RNA
  misc_feature 1..10: note = Description of sequence: Splice site sequence
acggtgtgac

SEQ ID NO: 4269 - RNA, 10 nt, synthetic construct
  source 1..10: mol_type = other RNA
  misc_feature 1..10: note = Description of sequence: Splice site sequence
gtggtatgtg

SEQ ID NO: 4270 - RNA, 10 nt, synthetic construct
  source 1..10: mol_type = other RNA
  misc_feature 1..10: note = Description of sequence: Splice site sequence
aaagtatctg

SEQ ID NO: 4271 - RNA, 10 nt, synthetic construct
  source 1..10: mol_type = other RNA
  misc_feature 1..10: note = Description of sequence: Splice site sequence
cgggtatgta

SEQ ID NO: 4272 - RNA, 10 nt, synthetic construct
  source 1..10: mol_type = other RNA
  misc_feature 1..10: note = Description of sequence: Splice site sequence
aaagtattta

SEQ ID NO: 4273 - RNA, 10 nt, synthetic construct
  source 1..10: mol_type = other RNA
  misc_feature 1..10: note = Description of sequence: Splice site sequence
acggtatgag

SEQ ID NO: 4274 - RNA, 10 nt, synthetic construct
  source 1..10: mol_type = other RNA
  misc_feature 1..10: note = Description of sequence: Splice site sequence
agagtaaaat

SEQ ID NO: 4275 - RNA, 10 nt, synthetic construct
  source 1..10: mol_type = other RNA
  misc_feature 1..10: note = Description of sequence: Splice site sequence
gctgtatggc

SEQ ID NO: 4276 - RNA, 10 nt, synthetic construct
  source 1..10: mol_type = other RNA
  misc_feature 1..10: note = Description of sequence: Splice site sequence
gcagtaataa

SEQ ID NO: 4277 - RNA, 10 nt, synthetic construct
  source 1..10: mol_type = other RNA
  misc_feature 1..10: note = Description of sequence: Splice site sequence
taagtattta

SEQ ID NO: 4278 - RNA, 10 nt, synthetic construct
  source 1..10: mol_type = other RNA
  misc_feature 1..10: note = Description of sequence: Splice site sequence
attgcaggag

SEQ ID NO: 4279 - RNA, 10 nt, synthetic construct
  source 1..10: mol_type = other RNA
  misc_feature 1..10: note = Description of sequence: Splice site sequence
ccggtaagaa

SEQ ID NO: 4280 - RNA, 10 nt, synthetic construct
  source 1..10: mol_type = other RNA
  misc_feature 1..10: note = Description of sequence: Splice site sequence
gaggtttgtc

SEQ ID NO: 4281 - RNA, 10 nt, synthetic construct
  source 1..10: mol_type = other RNA
  misc_feature 1..10: note = Description of sequence: Splice site sequence
aaagtatgag

SEQ ID NO: 4282 - RNA, 10 nt, synthetic construct
  source 1..10: mol_type = other RNA
  misc_feature 1..10: note = Description of sequence: Splice site sequence
gatgttagta

SEQ ID NO: 4283 - RNA, 10 nt, synthetic construct
  source 1..10: mol_type = other RNA
  misc_feature 1..10: note = Description of sequence: Splice site sequence
aaggtaccga

SEQ ID NO: 4284 - RNA, 10 nt, synthetic construct
  source 1..10: mol_type = other RNA
  misc_feature 1..10: note = Description of sequence: Splice site sequence
ccagtaatta

SEQ ID NO: 4285 - RNA, 10 nt, synthetic construct
  source 1..10: mol_type = other RNA
  misc_feature 1..10: note = Description of sequence: Splice site sequence
gtggtatgcg

SEQ ID NO: 4286 - RNA, 10 nt, synthetic construct
  source 1..10: mol_type = other RNA
  misc_feature 1..10: note = Description of sequence: Splice site sequence
atggtgcgct

SEQ ID NO: 4287 - RNA, 10 nt, synthetic construct
  source 1..10: mol_type = other RNA
  misc_feature 1..10: note = Description of sequence: Splice site sequence
caggtctatg

SEQ ID NO: 4288 - RNA, 10 nt, synthetic construct
  source 1..10: mol_type = other RNA
  misc_feature 1..10: note = Description of sequence: Splice site sequence
ctagtaagat

SEQ ID NO: 4289 - RNA, 10 nt, synthetic construct
  source 1..10: mol_type = other RNA
  misc_feature 1..10: note = Description of sequence: Splice site sequence
gaggtaacgt

SEQ ID NO: 4290 - RNA, 10 nt, synthetic construct
  source 1..10: mol_type = other RNA
  misc_feature 1..10: note = Description of sequence: Splice site sequence
ctggtcccgg

SEQ ID NO: 4291 - RNA, 10 nt, synthetic construct
  source 1..10: mol_type = other RNA
  misc_feature 1..10: note = Description of sequence: Splice site sequence
gaggtccttc

SEQ ID NO: 4292 - RNA, 10 nt, synthetic construct
  source 1..10: mol_type = other RNA
  misc_feature 1..10: note = Description of sequence: Splice site sequence
acggtcaccc

SEQ ID NO: 4293 - RNA, 10 nt, synthetic construct
  source 1..10: mol_type = other RNA
  misc_feature 1..10: note = Description of sequence: Splice site sequence
atggtaatag

SEQ ID NO: 4294 - RNA, 10 nt, synthetic construct
  source 1..10: mol_type = other RNA
  misc_feature 1..10: note = Description of sequence: Splice site sequence
tttgtaacac

SEQ ID NO: 4295 - RNA, 10 nt, synthetic construct
  source 1..10: mol_type = other RNA
  misc_feature 1..10: note = Description of sequence: Splice site sequence
tgggtatgat

SEQ ID NO: 4296 - RNA, 10 nt, synthetic construct
  source 1..10: mol_type = other RNA
  misc_feature 1..10: note = Description of sequence: Splice site sequence
caggcccccc

SEQ ID NO: 4297 - RNA, 10 nt, synthetic construct
  source 1..10: mol_type = other RNA
  misc_feature 1..10: note = Description of sequence: Splice site sequence
agagtagtaa

SEQ ID NO: 4298 - RNA, 10 nt, synthetic construct
  source 1..10: mol_type = other RNA
  misc_feature 1..10: note = Description of sequence: Splice site sequence
tgggttggtt

SEQ ID NO: 4299 - RNA, 10 nt, synthetic construct
  source 1..10: mol_type = other RNA
  misc_feature 1..10: note = Description of sequence: Splice site sequence
gaggtgcggc

SEQ ID NO: 4300 - RNA, 10 nt, synthetic construct
  source 1..10: mol_type = other RNA
  misc_feature 1..10: note = Description of sequence: Splice site sequence
tctgtacggg

SEQ ID NO: 4301 - RNA, 10 nt, synthetic construct
  source 1..10: mol_type = other RNA
  misc_feature 1..10: note = Description of sequence: Splice site sequence
cgggtgcgtg

SEQ ID NO: 4302 - RNA, 10 nt, synthetic construct
  source 1..10: mol_type = other RNA
  misc_feature 1..10: note = Description of sequence: Splice site sequence
catgtaagga

SEQ ID NO: 4303 - RNA, 10 nt, synthetic construct
  source 1..10: mol_type = other RNA
  misc_feature 1..10: note = Description of sequence: Splice site sequence
gatgtatgct

SEQ ID NO: 4304 - RNA, 10 nt, synthetic construct
  source 1..10: mol_type = other RNA
  misc_feature 1..10: note = Description of sequence: Splice site sequence
tctgcaattc

SEQ ID NO: 4305 - RNA, 10 nt, synthetic construct
  source 1..10: mol_type = other RNA
  misc_feature 1..10: note = Description of sequence: Splice site sequence
ttggtggggg

SEQ ID NO: 4306 - RNA, 10 nt, synthetic construct
  source 1..10: mol_type = other RNA
  misc_feature 1..10: note = Description of sequence: Splice site sequence
tgagctcaaa

SEQ ID NO: 4307 - RNA, 10 nt, synthetic construct
  source 1..10: mol_type = other RNA
  misc_feature 1..10: note = Description of sequence: Splice site sequence
tcggtatgta

SEQ ID NO: 4308 - RNA, 10 nt, synthetic construct
  source 1..10: mol_type = other RNA
  misc_feature 1..10: note = Description of sequence: Splice site sequence
taagtatgcc

SEQ ID NO: 4309 - RNA, 10 nt, synthetic construct
  source 1..10: mol_type = other RNA
  misc_feature 1..10: note = Description of sequence: Splice site sequence
caggtttgca

SEQ ID NO: 4310 - RNA, 10 nt, synthetic construct
  source 1..10: mol_type = other RNA
  misc_feature 1..10: note = Description of sequence: Splice site sequence
acggtgagag

SEQ ID NO: 4311 - RNA, 10 nt, synthetic construct
  source 1..10: mol_type = other RNA
  misc_feature 1..10: note = Description of sequence: Splice site sequence
caggtgtttt

SEQ ID NO: 4312 - RNA, 10 nt, synthetic construct
  source 1..10: mol_type = other RNA
  misc_feature 1..10: note = Description of sequence: Splice site sequence
gtggtgagcc

SEQ ID NO: 4313 - RNA, 10 nt, synthetic construct
  source 1..10: mol_type = other RNA
  misc_feature 1..10: note = Description of sequence: Splice site sequence
agggtacata

SEQ ID NO: 4314 - RNA, 10 nt, synthetic construct
  source 1..10: mol_type = other RNA
  misc_feature 1..10: note = Description of sequence: Splice site sequence
taggtaaccc

SEQ ID NO: 4315 - RNA, 10 nt, synthetic construct
  source 1..10: mol_type = other RNA
  misc_feature 1..10: note = Description of sequence: Splice site sequence
gtggtcagta

SEQ ID NO: 4316 - RNA, 10 nt, synthetic construct
  source 1..10: mol_type = other RNA
  misc_feature 1..10: note = Description of sequence: Splice site sequence
ctggtgagcc

SEQ ID NO: 4317 - RNA, 10 nt, synthetic construct
  source 1..10: mol_type = other RNA
  misc_feature 1..10: note = Description of sequence: Splice site sequence
atagtcgtga

SEQ ID NO: 4318 - RNA, 10 nt, synthetic construct
  source 1..10: mol_type = other RNA
  misc_feature 1..10: note = Description of sequence: Splice site sequence
gaggtcaaaa

SEQ ID NO: 4319 - RNA, 10 nt, synthetic construct
  source 1..10: mol_type = other RNA
  misc_feature 1..10: note = Description of sequence: Splice site sequence
cgtgtagctt

SEQ ID NO: 4320 - RNA, 10 nt, synthetic construct
  source 1..10: mol_type = other RNA
  misc_feature 1..10: note = Description of sequence: Splice site sequence
caggtgtttg

SEQ ID NO: 4321 - RNA, 10 nt, synthetic construct
  source 1..10: mol_type = other RNA
  misc_feature 1..10: note = Description of sequence: Splice site sequence
caggttggac

SEQ ID NO: 4322 - RNA, 10 nt, synthetic construct
  source 1..10: mol_type = other RNA
  misc_feature 1..10: note = Description of sequence: Splice site sequence
caggtaagct

SEQ ID NO: 4323 - RNA, 10 nt, synthetic construct
  source 1..10: mol_type = other RNA
  misc_feature 1..10: note = Description of sequence: Splice site sequence
agggtcagaa

SEQ ID NO: 4324 - RNA, 10 nt, synthetic construct
  source 1..10: mol_type = other RNA
  misc_feature 1..10: note = Description of sequence: Splice site sequence
cacgtatgtc

SEQ ID NO: 4325 - RNA, 10 nt, synthetic construct
  source 1..10: mol_type = other RNA
  misc_feature 1..10: note = Description of sequence: Splice site sequence
ggggtacgga

SEQ ID NO: 4326 - RNA, 10 nt, synthetic construct
  source 1..10: mol_type = other RNA
  misc_feature 1..10: note = Description of sequence: Splice site sequence
aaggcaggac

SEQ ID NO: 4327 - RNA, 10 nt, synthetic construct
  source 1..10: mol_type = other RNA
  misc_feature 1..10: note = Description of sequence: Splice site sequence
gaggtgaagc

SEQ ID NO: 4328 - RNA, 10 nt, synthetic construct
  source 1..10: mol_type = other RNA
  misc_feature 1..10: note = Description of sequence: Splice site sequence
gaggtttgaa

SEQ ID NO: 4329 - RNA, 10 nt, synthetic construct
  source 1..10: mol_type = other RNA
  misc_feature 1..10: note = Description of sequence: Splice site sequence
gaggcaggtg

SEQ ID NO: 4330 - RNA, 10 nt, synthetic construct
  source 1..10: mol_type = other RNA
  misc_feature 1..10: note = Description of sequence: Splice site sequence
gaggttcgga

SEQ ID NO: 4331 - RNA, 10 nt, synthetic construct
  source 1..10: mol_type = other RNA
  misc_feature 1..10: note = Description of sequence: Splice site sequence
caggtgatac

SEQ ID NO: 4332 - RNA, 10 nt, synthetic construct
  source 1..10: mol_type = other RNA
  misc_feature 1..10: note = Description of sequence: Splice site sequence
agggtggggg

SEQ ID NO: 4333 - RNA, 10 nt, synthetic construct
  source 1..10: mol_type = other RNA
  misc_feature 1..10: note = Description of sequence: Splice site sequence
tgggtgaaca

SEQ ID NO: 4334 - RNA, 10 nt, synthetic construct
  source 1..10: mol_type = other RNA
  misc_feature 1..10: note = Description of sequence: Splice site sequence
taggtactgc

SEQ ID NO: 4335 - RNA, 10 nt, synthetic construct
  source 1..10: mol_type = other RNA
  misc_feature 1..10: note = Description of sequence: Splice site sequence
caggctcctg

SEQ ID NO: 4336 - RNA, 10 nt, synthetic construct
  source 1..10: mol_type = other RNA
  misc_feature 1..10: note = Description of sequence: Splice site sequence
gaggtacatc

SEQ ID NO: 4337 - RNA, 10 nt, synthetic construct
  source 1..10: mol_type = other RNA
  misc_feature 1..10: note = Description of sequence: Splice site sequence
ctagtaggtg

SEQ ID NO: 4338 - RNA, 10 nt, synthetic construct
  source 1..10: mol_type = other RNA
  misc_feature 1..10: note = Description of sequence: Splice site sequence
gaggcaagga

SEQ ID NO: 4339 - RNA, 10 nt, synthetic construct
  source 1..10: mol_type = other RNA
  misc_feature 1..10: note = Description of sequence: Splice site sequence
aaggcaagac

SEQ ID NO: 4340 - RNA, 10 nt, synthetic construct
  source 1..10: mol_type = other RNA
  misc_feature 1..10: note = Description of sequence: Splice site sequence
aaagtgcggt

SEQ ID NO: 4341 - RNA, 10 nt, synthetic construct
  source 1..10: mol_type = other RNA
  misc_feature 1..10: note = Description of sequence: Splice site sequence
gaggttaatg

SEQ ID NO: 4342 - RNA, 10 nt, synthetic construct
  source 1..10: mol_type = other RNA
  misc_feature 1..10: note = Description of sequence: Splice site sequence
gcagtaagca

SEQ ID NO: 4343 - RNA, 10 nt, synthetic construct
  source 1..10: mol_type = other RNA
  misc_feature 1..10: note = Description of sequence: Splice site sequence
aaggcaagca

SEQ ID NO: 4344 - RNA, 10 nt, synthetic construct
  source 1..10: mol_type = other RNA
  misc_feature 1..10: note = Description of sequence: Splice site sequence
acagtaagct

SEQ ID NO: 4345 - RNA, 10 nt, synthetic construct
  source 1..10: mol_type = other RNA
  misc_feature 1..10: note = Description of sequence: Splice site sequence
aaagtacgta

SEQ ID NO: 4346 - RNA, 10 nt, synthetic construct
  source 1..10: mol_type = other RNA
  misc_feature 1..10: note = Description of sequence: Splice site sequence
ctggttagtc

SEQ ID NO: 4347 - RNA, 10 nt, synthetic construct
  source 1..10: mol_type = other RNA
  misc_feature 1..10: note = Description of sequence: Splice site sequence
gaggtgacgc

SEQ ID NO: 4348 - RNA, 10 nt, synthetic construct
  source 1..10: mol_type = other RNA
  misc_feature 1..10: note = Description of sequence: Splice site sequence
acagtaagga

SEQ ID NO: 4349 - RNA, 10 nt, synthetic construct
  source 1..10: mol_type = other RNA
  misc_feature 1..10: note = Description of sequence: Splice site sequence
aatgtactta

SEQ ID NO: 4350 - RNA, 10 nt, synthetic construct
  source 1..10: mol_type = other RNA
  misc_feature 1..10: note = Description of sequence: Splice site sequence
ggggtacagt

SEQ ID NO: 4351 - RNA, 10 nt, synthetic construct
  source 1..10: mol_type = other RNA
  misc_feature 1..10: note = Description of sequence: Splice site sequence
cgtgtatgtg

SEQ ID NO: 4352 - RNA, 10 nt, synthetic construct
  source 1..10: mol_type = other RNA
  misc_feature 1..10: note = Description of sequence: Splice site sequence
tccgtaggtt

SEQ ID NO: 4353 - RNA, 10 nt, synthetic construct
  source 1..10: mol_type = other RNA
  misc_feature 1..10: note = Description of sequence: Splice site sequence
gaggtggtcg

SEQ ID NO: 4354 - RNA, 10 nt, synthetic construct
  source 1..10: mol_type = other RNA
  misc_feature 1..10: note = Description of sequence: Splice site sequence
tcagtgagtc

SEQ ID NO: 4355 - RNA, 10 nt, synthetic construct
  source 1..10: mol_type = other RNA
  misc_feature 1..10: note = Description of sequence: Splice site sequence
gaggtaatta

SEQ ID NO: 4356 - RNA, 10 nt, synthetic construct
  source 1..10: mol_type = other RNA
  misc_feature 1..10: note = Description of sequence: Splice site sequence
tctgtgagca

SEQ ID NO: 4357 - RNA, 10 nt, synthetic construct
  source 1..10: mol_type = other RNA
  misc_feature 1..10: note = Description of sequence: Splice site sequence
gaagttcgtg

SEQ ID NO: 4358 - RNA, 10 nt, synthetic construct
  source 1..10: mol_type = other RNA
  misc_feature 1..10: note = Description of sequence: Splice site sequence
acggtgaggc

SEQ ID NO: 4359 - RNA, 10 nt, synthetic construct
  source 1..10: mol_type = other RNA
  misc_feature 1..10: note = Description of sequence: Splice site sequence
taggtagttg

SEQ ID NO: 4360 - RNA, 10 nt, synthetic construct
  source 1..10: mol_type = other RNA
  misc_feature 1..10: note = Description of sequence: Splice site sequence
ggtgtctggg

SEQ ID NO: 4361 - RNA, 10 nt, synthetic construct
  source 1..10: mol_type = other RNA
  misc_feature 1..10: note = Description of sequence: Splice site sequence
tgtgtgagtt

SEQ ID NO: 4362 - RNA, 10 nt, synthetic construct
  source 1..10: mol_type = other RNA
  misc_feature 1..10: note = Description of sequence: Splice site sequence
aatgtaggag

SEQ ID NO: 4363 - RNA, 10 nt, synthetic construct
  source 1..10: mol_type = other RNA
  misc_feature 1..10: note = Description of sequence: Splice site sequence
gaggcacgtc

SEQ ID NO: 4364 - RNA, 10 nt, synthetic construct
  source 1..10: mol_type = other RNA
  misc_feature 1..10: note = Description of sequence: Splice site sequence
caagtacatt

SEQ ID NO: 4365 - RNA, 10 nt, synthetic construct
  source 1..10: mol_type = other RNA
  misc_feature 1..10: note = Description of sequence: Splice site sequence
ttggtacaga

SEQ ID NO: 4366 - RNA, 10 nt, synthetic construct
  source 1..10: mol_type = other RNA
  misc_feature 1..10: note = Description of sequence: Splice site sequence
ttggtcagtg

SEQ ID NO: 4367 - RNA, 10 nt, synthetic construct
  source 1..10: mol_type = other RNA
  misc_feature 1..10: note = Description of sequence: Splice site sequence
ggtgtgggcc

SEQ ID NO: 4368 - RNA, 10 nt, synthetic construct
  source 1..10: mol_type = other RNA
  misc_feature 1..10: note = Description of sequence: Splice site sequence
cgggtgagct

SEQ ID NO: 4369 - RNA, 10 nt, synthetic construct
  source 1..10: mol_type = other RNA
  misc_feature 1..10: note = Description of sequence: Splice site sequence
acagtgagag

SEQ ID NO: 4370 - RNA, 10 nt, synthetic construct
  source 1..10: mol_type = other RNA
  misc_feature 1..10: note = Description of sequence: Splice site sequence
atagtaggtt

SEQ ID NO: 4371 - RNA, 10 nt, synthetic construct
  source 1..10: mol_type = other RNA
  misc_feature 1..10: note = Description of sequence: Splice site sequence
caggtccgtg

SEQ ID NO: 4372 - RNA, 10 nt, synthetic construct
  source 1..10: mol_type = other RNA
  misc_feature 1..10: note = Description of sequence: Splice site sequence
gaggcaggta

SEQ ID NO: 4373 - RNA, 10 nt, synthetic construct
  source 1..10: mol_type = other RNA
  misc_feature 1..10: note = Description of sequence: Splice site sequence
atggtggaag

SEQ ID NO: 4374 - RNA, 10 nt, synthetic construct
  source 1..10: mol_type = other RNA
  misc_feature 1..10: note = Description of sequence: Splice site sequence
atggtgggcg

SEQ ID NO: 4375 - RNA, 10 nt, synthetic construct
  source 1..10: mol_type = other RNA
  misc_feature 1..10: note = Description of sequence: Splice site sequence
caagtaagca

SEQ ID NO: 4376 - RNA, 10 nt, synthetic construct
  source 1..10: mol_type = other RNA
  misc_feature 1..10: note = Description of sequence: Splice site sequence
cccgtgggta

SEQ ID NO: 4377 - RNA, 10 nt, synthetic construct
  source 1..10: mol_type = other RNA
  misc_feature 1..10: note = Description of sequence: Splice site sequence
caggtagaat

SEQ ID NO: 4378 - RNA, 10 nt, synthetic construct
  source 1..10: mol_type = other RNA
  misc_feature 1..10: note = Description of sequence: Splice site sequence
caggctgagc

SEQ ID NO: 4379 - RNA, 10 nt, synthetic construct
  source 1..10: mol_type = other RNA
  misc_feature 1..10: note = Description of sequence: Splice site sequence
ctggtggccc

SEQ ID NO: 4380 - RNA, 10 nt, synthetic construct
  source 1..10: mol_type = other RNA
  misc_feature 1..10: note = Description of sequence: Splice site sequence
tgagtaagag

SEQ ID NO: 4381 - RNA, 10 nt, synthetic construct
  source 1..10: mol_type = other RNA
  misc_feature 1..10: note = Description of sequence: Splice site sequence
cacgttagct

SEQ ID NO: 4382 - RNA, 10 nt, synthetic construct
  source 1..10: mol_type = other RNA
  misc_feature 1..10: note = Description of sequence: Splice site sequence
aaggtagctc

SEQ ID NO: 4383 - RNA, 10 nt, synthetic construct
  source 1..10: mol_type = other RNA
  misc_feature 1..10: note = Description of sequence: Splice site sequence
tcggtgagtt

SEQ ID NO: 4384 - RNA, 10 nt, synthetic construct
  source 1..10: mol_type = other RNA
  misc_feature 1..10: note = Description of sequence: Splice site sequence
gaggcccttc

SEQ ID NO: 4385 - RNA, 10 nt, synthetic construct
  source 1..10: mol_type = other RNA
  misc_feature 1..10: note = Description of sequence: Splice site sequence
caggttatgc

SEQ ID NO: 4386 - RNA, 10 nt, synthetic construct
  source 1..10: mol_type = other RNA
  misc_feature 1..10: note = Description of sequence: Splice site sequence
cctgtaagct

SEQ ID NO: 4387 - RNA, 10 nt, synthetic construct
  source 1..10: mol_type = other RNA
  misc_feature 1..10: note = Description of sequence: Splice site sequence
caggtctcct

SEQ ID NO: 4388 - RNA, 10 nt, synthetic construct
  source 1..10: mol_type = other RNA
  misc_feature 1..10: note = Description of sequence: Splice site sequence
taggtaggct

SEQ ID NO: 4389 - RNA, 10 nt, synthetic construct
  source 1..10: mol_type = other RNA
  misc_feature 1..10: note = Description of sequence: Splice site sequence
ggggtagggg

SEQ ID NO: 4390 - RNA, 10 nt, synthetic construct
  source 1..10: mol_type = other RNA
  misc_feature 1..10: note = Description of sequence: Splice site sequence
aaggtagtga

SEQ ID NO: 4391 - RNA, 10 nt, synthetic construct
  source 1..10: mol_type = other RNA
  misc_feature 1..10: note = Description of sequence: Splice site sequence
gaggttgttg

SEQ ID NO: 4392 - RNA, 10 nt, synthetic construct
  source 1..10: mol_type = other RNA
  misc_feature 1..10: note = Description of sequence: Splice site sequence
tgggtgtgat

SEQ ID NO: 4393 - RNA, 10 nt, synthetic construct
  source 1..10: mol_type = other RNA
  misc_feature 1..10: note = Description of sequence: Splice site sequence
cccgtaacta

SEQ ID NO: 4394 - RNA, 10 nt, synthetic construct
  source 1..10: mol_type = other RNA
  misc_feature 1..10: note = Description of sequence: Splice site sequence
aaagctggtg

SEQ ID NO: 4395 - RNA, 10 nt, synthetic construct
  source 1..10: mol_type = other RNA
  misc_feature 1..10: note = Description of sequence: Splice site sequence
gaggtatagt

SEQ ID NO: 4396 - RNA, 10 nt, synthetic construct
  source 1..10: mol_type = other RNA
  misc_feature 1..10: note = Description of sequence: Splice site sequence
acggtaagag

SEQ ID NO: 4397 - RNA, 10 nt, synthetic construct
  source 1..10: mol_type = other RNA
  misc_feature 1..10: note = Description of sequence: Splice site sequence
gaggccagtt

SEQ ID NO: 4398 - RNA, 10 nt, synthetic construct
  source 1..10: mol_type = other RNA
  misc_feature 1..10: note = Description of sequence: Splice site sequence
tcggtgggag

SEQ ID NO: 4399 - RNA, 10 nt, synthetic construct
  source 1..10: mol_type = other RNA
  misc_feature 1..10: note = Description of sequence: Splice site sequence
ccagtgtggc

SEQ ID NO: 4400 - RNA, 10 nt, synthetic construct
  source 1..10: mol_type = other RNA
  misc_feature 1..10: note = Description of sequence: Splice site sequence
tctgtaggtc

SEQ ID NO: 4401 - RNA, 10 nt, synthetic construct
  source 1..10: mol_type = other RNA
  misc_feature 1..10: note = Description of sequence: Splice site sequence
aaggtcaatt

SEQ ID NO: 4402 - RNA, 10 nt, synthetic construct
  source 1..10: mol_type = other RNA
  misc_feature 1..10: note = Description of sequence: Splice site sequence
gtcgtaagaa

SEQ ID NO: 4403 - RNA, 10 nt, synthetic construct
  source 1..10: mol_type = other RNA
  misc_feature 1..10: note = Description of sequence: Splice site sequence
gcggtaagtc

SEQ ID NO: 4404 - RNA, 10 nt, synthetic construct
  source 1..10: mol_type = other RNA
  misc_feature 1..10: note = Description of sequence: Splice site sequence
ctggtagagc

SEQ ID NO: 4405 - RNA, 10 nt, synthetic construct
  source 1..10: mol_type = other RNA
  misc_feature 1..10: note = Description of sequence: Splice site sequence
gaggtcggtc

SEQ ID NO: 4406 - RNA, 10 nt, synthetic construct
  source 1..10: mol_type = other RNA
  misc_feature 1..10: note = Description of sequence: Splice site sequence
caggtcgtct

SEQ ID NO: 4407 - RNA, 10 nt, synthetic construct
  source 1..10: mol_type = other RNA
  misc_feature 1..10: note = Description of sequence: Splice site sequence
ggggtagggc

SEQ ID NO: 4408 - RNA, 10 nt, synthetic construct
  source 1..10: mol_type = other RNA
  misc_feature 1..10: note = Description of sequence: Splice site sequence
cttgtcagct

SEQ ID NO: 4409 - RNA, 10 nt, synthetic construct
  source 1..10: mol_type = other RNA
  misc_feature 1..10: note = Description of sequence: Splice site sequence
ctggtattac

SEQ ID NO: 4410 - RNA, 10 nt, synthetic construct
  source 1..10: mol_type = other RNA
  misc_feature 1..10: note = Description of sequence: Splice site sequence
taagtacgtc

SEQ ID NO: 4411 - RNA, 10 nt, synthetic construct
  source 1..10: mol_type = other RNA
  misc_feature 1..10: note = Description of sequence: Splice site sequence
acggtgaaag

SEQ ID NO: 4412 - RNA, 10 nt, synthetic construct
  source 1..10: mol_type = other RNA
  misc_feature 1..10: note = Description of sequence: Splice site sequence
ccagccaata

SEQ ID NO: 4413 - RNA, 10 nt, synthetic construct
  source 1..10: mol_type = other RNA
  misc_feature 1..10: note = Description of sequence: Splice site sequence
caggtttgtc

SEQ ID NO: 4414 - RNA, 10 nt, synthetic construct
  source 1..10: mol_type = other RNA
  misc_feature 1..10: note = Description of sequence: Splice site sequence
aaggtcttag

SEQ ID NO: 4415 - RNA, 10 nt, synthetic construct
  source 1..10: mol_type = other RNA
  misc_feature 1..10: note = Description of sequence: Splice site sequence
aaggttaggg

SEQ ID NO: 4416 - RNA, 10 nt, synthetic construct
  source 1..10: mol_type = other RNA
  misc_feature 1..10: note = Description of sequence: Splice site sequence
cgggtaaatt

SEQ ID NO: 4417 - RNA, 10 nt, synthetic construct
  source 1..10: mol_type = other RNA
  misc_feature 1..10: note = Description of sequence: Splice site sequence
caggtaacgg

SEQ ID NO: 4418 - RNA, 10 nt, synthetic construct
  source 1..10: mol_type = other RNA
  misc_feature 1..10: note = Description of sequence: Splice site sequence
agagtgtgta

SEQ ID NO: 4419 - RNA, 10 nt, synthetic construct
  source 1..10: mol_type = other RNA
  misc_feature 1..10: note = Description of sequence: Splice site sequence
gatgtaattt

SEQ ID NO: 4420 - RNA, 10 nt, synthetic construct
  source 1..10: mol_type = other RNA
  misc_feature 1..10: note = Description of sequence: Splice site sequence
aaagtgagga

SEQ ID NO: 4421 - RNA, 10 nt, synthetic construct
  source 1..10: mol_type = other RNA
  misc_feature 1..10: note = Description of sequence: Splice site sequence
ggagtaaata

SEQ ID NO: 4422 - RNA, 10 nt, synthetic construct
  source 1..10: mol_type = other RNA
  misc_feature 1..10: note = Description of sequence: Splice site sequence
gtggtaccca

SEQ ID NO: 4423 - RNA, 10 nt, synthetic construct
  source 1..10: mol_type = other RNA
  misc_feature 1..10: note = Description of sequence: Splice site sequence
caggtattgc

SEQ ID NO: 4424 - RNA, 10 nt, synthetic construct
  source 1..10: mol_type = other RNA
  misc_feature 1..10: note = Description of sequence: Splice site sequence
gatgtgaggg

SEQ ID NO: 4425 - RNA, 10 nt, synthetic construct
  source 1..10: mol_type = other RNA
  misc_feature 1..10: note = Description of sequence: Splice site sequence
aaggtaacag

SEQ ID NO: 4426 - RNA, 10 nt, synthetic construct
  source 1..10: mol_type = other RNA
  misc_feature 1..10: note = Description of sequence: Splice site sequence
ttggtaaaag

SEQ ID NO: 4427 - RNA, 10 nt, synthetic construct
  source 1..10: mol_type = other RNA
  misc_feature 1..10: note = Description of sequence: Splice site sequence
acggtgagac

SEQ ID NO: 4428 - RNA, 10 nt, synthetic construct
  source 1..10: mol_type = other RNA
  misc_feature 1..10: note = Description of sequence: Splice site sequence
ctggtatgac

SEQ ID NO: 4429 - RNA, 10 nt, synthetic construct
  source 1..10: mol_type = other RNA
  misc_feature 1..10: note = Description of sequence: Splice site sequence
caggttcact

SEQ ID NO: 4430 - RNA, 10 nt, synthetic construct
  source 1..10: mol_type = other RNA
  misc_feature 1..10: note = Description of sequence: Splice site sequence
gaggtgatca

SEQ ID NO: 4431 - RNA, 10 nt, synthetic construct
  source 1..10: mol_type = other RNA
  misc_feature 1..10: note = Description of sequence: Splice site sequence
agtgtaagtc

SEQ ID NO: 4432 - RNA, 10 nt, synthetic construct
  source 1..10: mol_type = other RNA
  misc_feature 1..10: note = Description of sequence: Splice site sequence
aacgtaagta

SEQ ID NO: 4433 - RNA, 10 nt, synthetic construct
  source 1..10: mol_type = other RNA
  misc_feature 1..10: note = Description of sequence: Splice site sequence
gaggtacagg

SEQ ID NO: 4434 - RNA, 10 nt, synthetic construct
  source 1..10: mol_type = other RNA
  misc_feature 1..10: note = Description of sequence: Splice site sequence
caagtaatga

SEQ ID NO: 4435 - RNA, 10 nt, synthetic construct
  source 1..10: mol_type = other RNA
  misc_feature 1..10: note = Description of sequence: Splice site sequence
gatgtaagga

SEQ ID NO: 4436 - RNA, 10 nt, synthetic construct
  source 1..10: mol_type = other RNA
  misc_feature 1..10: note = Description of sequence: Splice site sequence
tcagttcccc

SEQ ID NO: 4437 - RNA, 10 nt, synthetic construct
  source 1..10: mol_type = other RNA
  misc_feature 1..10: note = Description of sequence: Splice site sequence
gcggtaagga

SEQ ID NO: 4438 - RNA, 10 nt, synthetic construct
  source 1..10: mol_type = other RNA
  misc_feature 1..10: note = Description of sequence: Splice site sequence
taggtactaa

SEQ ID NO: 4439 - RNA, 10 nt, synthetic construct
  source 1..10: mol_type = other RNA
  misc_feature 1..10: note = Description of sequence: Splice site sequence
actgtaagtg

SEQ ID NO: 4440 - RNA, 10 nt, synthetic construct
  source 1..10: mol_type = other RNA
  misc_feature 1..10: note = Description of sequence: Splice site sequence
aaggtgtgct

SEQ ID NO: 4441 - RNA, 10 nt, synthetic construct
  source 1..10: mol_type = other RNA
  misc_feature 1..10: note = Description of sequence: Splice site sequence
aaggtggtga

SEQ ID NO: 4442 - RNA, 10 nt, synthetic construct
  source 1..10: mol_type = other RNA
  misc_feature 1..10: note = Description of sequence: Splice site sequence
acggtgcgcc

SEQ ID NO: 4443 - RNA, 10 nt, synthetic construct
  source 1..10: mol_type = other RNA
  misc_feature 1..10: note = Description of sequence: Splice site sequence
aaggtattgc

SEQ ID NO: 4444 - RNA, 10 nt, synthetic construct
  source 1..10: mol_type = other RNA
  misc_feature 1..10: note = Description of sequence: Splice site sequence
aacgtgaata

SEQ ID NO: 4445 - RNA, 10 nt, synthetic construct
  source 1..10: mol_type = other RNA
  misc_feature 1..10: note = Description of sequence: Splice site sequence
taggtatgat

SEQ ID NO: 4446 - RNA, 10 nt, synthetic construct
  source 1..10: mol_type = other RNA
  misc_feature 1..10: note = Description of sequence: Splice site sequence
ggggttggtc

SEQ ID NO: 4447 - RNA, 10 nt, synthetic construct
  source 1..10: mol_type = other RNA
  misc_feature 1..10: note = Description of sequence: Splice site sequence
taagtgaggc

SEQ ID NO: 4448 - RNA, 10 nt, synthetic construct
  source 1..10: mol_type = other RNA
  misc_feature 1..10: note = Description of sequence: Splice site sequence
caagtgatcg

SEQ ID NO: 4449 - RNA, 10 nt, synthetic construct
  source 1..10: mol_type = other RNA
  misc_feature 1..10: note = Description of sequence: Splice site sequence
aaagtacggg

SEQ ID NO: 4450 - RNA, 10 nt, synthetic construct
  source 1..10: mol_type = other RNA
  misc_feature 1..10: note = Description of sequence: Splice site sequence
agagctacag

SEQ ID NO: 4451 - RNA, 10 nt, synthetic construct
  source 1..10: mol_type = other RNA
  misc_feature 1..10: note = Description of sequence: Splice site sequence
tgggtacagc

SEQ ID NO: 4452 - RNA, 10 nt, synthetic construct
  source 1..10: mol_type = other RNA
  misc_feature 1..10: note = Description of sequence: Splice site sequence
aaggcaagaa

SEQ ID NO: 4453 - RNA, 10 nt, synthetic construct
  source 1..10: mol_type = other RNA
  misc_feature 1..10: note = Description of sequence: Splice site sequence
gaggtaaaca

SEQ ID NO: 4454 - RNA, 10 nt, synthetic construct
  source 1..10: mol_type = other RNA
  misc_feature 1..10: note = Description of sequence: Splice site sequence
aaggtagtca

SEQ ID NO: 4455 - RNA, 10 nt, synthetic construct
  source 1..10: mol_type = other RNA
  misc_feature 1..10: note = Description of sequence: Splice site sequence
ctggtatgtc

SEQ ID NO: 4456 - RNA, 10 nt, synthetic construct
  source 1..10: mol_type = other RNA
  misc_feature 1..10: note = Description of sequence: Splice site sequence
ctggtactga

SEQ ID NO: 4457 - RNA, 10 nt, synthetic construct
  source 1..10: mol_type = other RNA
  misc_feature 1..10: note = Description of sequence: Splice site sequence
caggttcgtg

SEQ ID NO: 4458 - RNA, 10 nt, synthetic construct
  source 1..10: mol_type = other RNA
  misc_feature 1..10: note = Description of sequence: Splice site sequence
aaggtatggt

SEQ ID NO: 4459 - RNA, 10 nt, synthetic construct
  source 1..10: mol_type = other RNA
  misc_feature 1..10: note = Description of sequence: Splice site sequence
tgtgtaggtg

SEQ ID NO: 4460 - RNA, 10 nt, synthetic construct
  source 1..10: mol_type = other RNA
  misc_feature 1..10: note = Description of sequence: Splice site sequence
ctggtaatat

SEQ ID NO: 4461 - RNA, 10 nt, synthetic construct
  source 1..10: mol_type = other RNA
  misc_feature 1..10: note = Description of sequence: Splice site sequence
ctagtgagaa

SEQ ID NO: 4462 - RNA, 10 nt, synthetic construct
  source 1..10: mol_type = other RNA
  misc_feature 1..10: note = Description of sequence: Splice site sequence
tcggtaagtg

SEQ ID NO: 4463 - RNA, 10 nt, synthetic construct
  source 1..10: mol_type = other RNA
  misc_feature 1..10: note = Description of sequence: Splice site sequence
gcggtagggc

SEQ ID NO: 4464 - RNA, 10 nt, synthetic construct
  source 1..10: mol_type = other RNA
  misc_feature 1..10: note = Description of sequence: Splice site sequence
gaggtaatcc

SEQ ID NO: 4465 - RNA, 10 nt, synthetic construct
  source 1..10: mol_type = other RNA
  misc_feature 1..10: note = Description of sequence: Splice site sequence
attgtaataa

SEQ ID NO: 4466 - RNA, 10 nt, synthetic construct
  source 1..10: mol_type = other RNA
  misc_feature 1..10: note = Description of sequence: Splice site sequence
aaggtttaaa

SEQ ID NO: 4467 - RNA, 10 nt, synthetic construct
  source 1..10: mol_type = other RNA
  misc_feature 1..10: note = Description of sequence: Splice site sequence
cctgtactgt

SEQ ID NO: 4468 - RNA, 10 nt, synthetic construct
  source 1..10: mol_type = other RNA
  misc_feature 1..10: note = Description of sequence: Splice site sequence
gcggtgagcg

SEQ ID NO: 4469 - RNA, 10 nt, synthetic construct
  source 1..10: mol_type = other RNA
  misc_feature 1..10: note = Description of sequence: Splice site sequence
caggtaggct

SEQ ID NO: 4470 - RNA, 10 nt, synthetic construct
  source 1..10: mol_type = other RNA
  misc_feature 1..10: note = Description of sequence: Splice site sequence
taggttggtc

SEQ ID NO: 4471 - RNA, 10 nt, synthetic construct
  source 1..10: mol_type = other RNA
  misc_feature 1..10: note = Description of sequence: Splice site sequence
caggttgcct

SEQ ID NO: 4472 - RNA, 10 nt, synthetic construct
  source 1..10: mol_type = other RNA
  misc_feature 1..10: note = Description of sequence: Splice site sequence
ggtgtggacg

SEQ ID NO: 4473 - RNA, 10 nt, synthetic construct
  source 1..10: mol_type = other RNA
  misc_feature 1..10: note = Description of sequence: Splice site sequence
gatgtggcat

SEQ ID NO: 4474 - RNA, 10 nt, synthetic construct
  source 1..10: mol_type = other RNA
  misc_feature 1..10: note = Description of sequence: Splice site sequence
tcggtaaggt

SEQ ID NO: 4475 - RNA, 10 nt, synthetic construct
  source 1..10: mol_type = other RNA
  misc_feature 1..10: note = Description of sequence: Splice site sequence
gaggtgcgtc

SEQ ID NO: 4476 - RNA, 10 nt, synthetic construct
  source 1..10: mol_type = other RNA
  misc_feature 1..10: note = Description of sequence: Splice site sequence
cgggtgagtc

SEQ ID NO: 4477 - RNA, 10 nt, synthetic construct
  source 1..10: mol_type = other RNA
  misc_feature 1..10: note = Description of sequence: Splice site sequence
gaggttcttg

SEQ ID NO: 4478 - RNA, 10 nt, synthetic construct
  source 1..10: mol_type = other RNA
  misc_feature 1..10: note = Description of sequence: Splice site sequence
aaggtgcttg

SEQ ID NO: 4479 - RNA, 10 nt, synthetic construct
  source 1..10: mol_type = other RNA
  misc_feature 1..10: note = Description of sequence: Splice site sequence
atggtcagca

SEQ ID NO: 4480 - RNA, 10 nt, synthetic construct
  source 1..10: mol_type = other RNA
  misc_feature 1..10: note = Description of sequence: Splice site sequence
cgggtactca

SEQ ID NO: 4481 - RNA, 10 nt, synthetic construct
  source 1..10: mol_type = other RNA
  misc_feature 1..10: note = Description of sequence: Splice site sequence
aaagttaatc

SEQ ID NO: 4482 - RNA, 10 nt, synthetic construct
  source 1..10: mol_type = other RNA
  misc_feature 1..10: note = Description of sequence: Splice site sequence
agcgtgagcg

SEQ ID NO: 4483 - RNA, 10 nt, synthetic construct
  source 1..10: mol_type = other RNA
  misc_feature 1..10: note = Description of sequence: Splice site sequence
ccggctggtg

SEQ ID NO: 4484 - RNA, 10 nt, synthetic construct
  source 1..10: mol_type = other RNA
  misc_feature 1..10: note = Description of sequence: Splice site sequence
agtgtaattt

SEQ ID NO: 4485 - RNA, 10 nt, synthetic construct
  source 1..10: mol_type = other RNA
  misc_feature 1..10: note = Description of sequence: Splice site sequence
tgagccactc

SEQ ID NO: 4486 - RNA, 10 nt, synthetic construct
  source 1..10: mol_type = other RNA
  misc_feature 1..10: note = Description of sequence: Splice site sequence
ggggtctgta

SEQ ID NO: 4487 - RNA, 10 nt, synthetic construct
  source 1..10: mol_type = other RNA
  misc_feature 1..10: note = Description of sequence: Splice site sequence
atggcatgtc

SEQ ID NO: 4488 - RNA, 10 nt, synthetic construct
  source 1..10: mol_type = other RNA
  misc_feature 1..10: note = Description of sequence: Splice site sequence
cgggtaaaga

SEQ ID NO: 4489 - RNA, 10 nt, synthetic construct
  source 1..10: mol_type = other RNA
  misc_feature 1..10: note = Description of sequence: Splice site sequence
agggtagcat

SEQ ID NO: 4490 - RNA, 10 nt, synthetic construct
  source 1..10: mol_type = other RNA
  misc_feature 1..10: note = Description of sequence: Splice site sequence
gaggttcgtg

SEQ ID NO: 4491 - RNA, 10 nt, synthetic construct
  source 1..10: mol_type = other RNA
  misc_feature 1..10: note = Description of sequence: Splice site sequence
taagttattc

SEQ ID NO: 4492 - RNA, 10 nt, synthetic construct
  source 1..10: mol_type = other RNA
  misc_feature 1..10: note = Description of sequence: Splice site sequence
caggtggtat

SEQ ID NO: 4493 - RNA, 10 nt, synthetic construct
  source 1..10: mol_type = other RNA
  misc_feature 1..10: note = Description of sequence: Splice site sequence
caggtgaagt

SEQ ID NO: 4494 - RNA, 10 nt, synthetic construct
  source 1..10: mol_type = other RNA
  misc_feature 1..10: note = Description of sequence: Splice site sequence
gtagtaatta

SEQ ID NO: 4495 - RNA, 10 nt, synthetic construct
  source 1..10: mol_type = other RNA
  misc_feature 1..10: note = Description of sequence: Splice site sequence
atggttggtg

SEQ ID NO: 4496 - RNA, 10 nt, synthetic construct
  source 1..10: mol_type = other RNA
  misc_feature 1..10: note = Description of sequence: Splice site sequence
aaggtgcctt

SEQ ID NO: 4497 - RNA, 10 nt, synthetic construct
  source 1..10: mol_type = other RNA
  misc_feature 1..10: note = Description of sequence: Splice site sequence
tccgtgagtt

SEQ ID NO: 4498 - RNA, 10 nt, synthetic construct
  source 1..10: mol_type = other RNA
  misc_feature 1..10: note = Description of sequence: Splice site sequence
aaagcaggta

SEQ ID NO: 4499 - RNA, 10 nt, synthetic construct
  source 1..10: mol_type = other RNA
  misc_feature 1..10: note = Description of sequence: Splice site sequence
caggtggagg

SEQ ID NO: 4500 - RNA, 10 nt, synthetic construct
  source 1..10: mol_type = other RNA
  misc_feature 1..10: note = Description of sequence: Splice site sequence
caggttagac

SEQ ID NO: 4501 - RNA, 10 nt, synthetic construct
  source 1..10: mol_type = other RNA
  misc_feature 1..10: note = Description of sequence: Splice site sequence
aaggtgttgt

SEQ ID NO: 4502 - RNA, 10 nt, synthetic construct
  source 1..10: mol_type = other RNA
  misc_feature 1..10: note = Description of sequence: Splice site sequence
gaggtctgtg

SEQ ID NO: 4503 - RNA, 10 nt, synthetic construct
  source 1..10: mol_type = other RNA
  misc_feature 1..10: note = Description of sequence: Splice site sequence
ctggtaatta

SEQ ID NO: 4504 - RNA, 10 nt, synthetic construct
  source 1..10: mol_type = other RNA
  misc_feature 1..10: note = Description of sequence: Splice site sequence
caggtaggcg

SEQ ID NO: 4505 - RNA, 10 nt, synthetic construct
  source 1..10: mol_type = other RNA
  misc_feature 1..10: note = Description of sequence: Splice site sequence
aatgtaggta

SEQ ID NO: 4506 - RNA, 10 nt, synthetic construct
  source 1..10: mol_type = other RNA
  misc_feature 1..10: note = Description of sequence: Splice site sequence
taggttagca

SEQ ID NO: 4507 - RNA, 10 nt, synthetic construct
  source 1..10: mol_type = other RNA
  misc_feature 1..10: note = Description of sequence: Splice site sequence
gaggtattgc

SEQ ID NO: 4508 - RNA, 10 nt, synthetic construct
  source 1..10: mol_type = other RNA
  misc_feature 1..10: note = Description of sequence: Splice site sequence
attgtacaca

SEQ ID NO: 4509 - RNA, 10 nt, synthetic construct
  source 1..10: mol_type = other RNA
  misc_feature 1..10: note = Description of sequence: Splice site sequence
gaagtaggta

SEQ ID NO: 4510 - RNA, 10 nt, synthetic construct
  source 1..10: mol_type = other RNA
  misc_feature 1..10: note = Description of sequence: Splice site sequence
ggtgtgagtt

SEQ ID NO: 4511 - RNA, 10 nt, synthetic construct
  source 1..10: mol_type = other RNA
  misc_feature 1..10: note = Description of sequence: Splice site sequence
aacgtgagtt

SEQ ID NO: 4512 - RNA, 10 nt, synthetic construct
  source 1..10: mol_type = other RNA
  misc_feature 1..10: note = Description of sequence: Splice site sequence
gaggtaaccg

SEQ ID NO: 4513 - RNA, 10 nt, synthetic construct
  source 1..10: mol_type = other RNA
  misc_feature 1..10: note = Description of sequence: Splice site sequence
attgtaagaa

SEQ ID NO: 4514 - RNA, 10 nt, synthetic construct
  source 1..10: mol_type = other RNA
  misc_feature 1..10: note = Description of sequence: Splice site sequence
ccagtatcgt

SEQ ID NO: 4515 - RNA, 10 nt, synthetic construct
  source 1..10: mol_type = other RNA
  misc_feature 1..10: note = Description of sequence: Splice site sequence
ccggtgggtg

SEQ ID NO: 4516 - RNA, 10 nt, synthetic construct
  source 1..10: mol_type = other RNA
  misc_feature 1..10: note = Description of sequence: Splice site sequence
gaggtagtgt

SEQ ID NO: 4517 - RNA, 10 nt, synthetic construct
  source 1..10: mol_type = other RNA
  misc_feature 1..10: note = Description of sequence: Splice site sequence
acggtgggaa

SEQ ID NO: 4518 - RNA, 10 nt, synthetic construct
  source 1..10: mol_type = other RNA
  misc_feature 1..10: note = Description of sequence: Splice site sequence
cacgtatgta

SEQ ID NO: 4519 - RNA, 10 nt, synthetic construct
  source 1..10: mol_type = other RNA
  misc_feature 1..10: note = Description of sequence: Splice site sequence
gcggtatgac

SEQ ID NO: 4520 - RNA, 10 nt, synthetic construct
  source 1..10: mol_type = other RNA
  misc_feature 1..10: note = Description of sequence: Splice site sequence
ccggtatttt

SEQ ID NO: 4521 - RNA, 10 nt, synthetic construct
  source 1..10: mol_type = other RNA
  misc_feature 1..10: note = Description of sequence: Splice site sequence
gaggtagaac

SEQ ID NO: 4522 - RNA, 10 nt, synthetic construct
  source 1..10: mol_type = other RNA
  misc_feature 1..10: note = Description of sequence: Splice site sequence
caggcgcgtg

SEQ ID NO: 4523 - RNA, 10 nt, synthetic construct
  source 1..10: mol_type = other RNA
  misc_feature 1..10: note = Description of sequence: Splice site sequence
aaggttctac

SEQ ID NO: 4524 - RNA, 10 nt, synthetic construct
  source 1..10: mol_type = other RNA
  misc_feature 1..10: note = Description of sequence: Splice site sequence
gaggtagcag

SEQ ID NO: 4525 - RNA, 10 nt, synthetic construct
  source 1..10: mol_type = other RNA
  misc_feature 1..10: note = Description of sequence: Splice site sequence
taagtgctgt

SEQ ID NO: 4526 - RNA, 10 nt, synthetic construct
  source 1..10: mol_type = other RNA
  misc_feature 1..10: note = Description of sequence: Splice site sequence
ctcgtaaggt

SEQ ID NO: 4527 - RNA, 10 nt, synthetic construct
  source 1..10: mol_type = other RNA
  misc_feature 1..10: note = Description of sequence: Splice site sequence
caggtcagct

SEQ ID NO: 4528 - RNA, 10 nt, synthetic construct
  source 1..10: mol_type = other RNA
  misc_feature 1..10: note = Description of sequence: Splice site sequence
agggtgcagg

SEQ ID NO: 4529 - RNA, 10 nt, synthetic construct
  source 1..10: mol_type = other RNA
  misc_feature 1..10: note = Description of sequence: Splice site sequence
gaggtgaaac

SEQ ID NO: 4530 - RNA, 10 nt, synthetic construct
  source 1..10: mol_type = other RNA
  misc_feature 1..10: note = Description of sequence: Splice site sequence
aatgtatgcc

SEQ ID NO: 4531 - RNA, 10 nt, synthetic construct
  source 1..10: mol_type = other RNA
  misc_feature 1..10: note = Description of sequence: Splice site sequence
tctgctcaat

SEQ ID NO: 4532 - RNA, 10 nt, synthetic construct
  source 1..10: mol_type = other RNA
  misc_feature 1..10: note = Description of sequence: Splice site sequence
acggtaatgt

SEQ ID NO: 4533 - RNA, 10 nt, synthetic construct
  source 1..10: mol_type = other RNA
  misc_feature 1..10: note = Description of sequence: Splice site sequence
aaggtagttg

SEQ ID NO: 4534 - RNA, 10 nt, synthetic construct
  source 1..10: mol_type = other RNA
  misc_feature 1..10: note = Description of sequence: Splice site sequence
caggtgatga

SEQ ID NO: 4535 - RNA, 10 nt, synthetic construct
  source 1..10: mol_type = other RNA
  misc_feature 1..10: note = Description of sequence: Splice site sequence
gaggtaacac

SEQ ID NO: 4536 - RNA, 10 nt, synthetic construct
  source 1..10: mol_type = other RNA
  misc_feature 1..10: note = Description of sequence: Splice site sequence
agggtgtgac

SEQ ID NO: 4537 - RNA, 10 nt, synthetic construct
  source 1..10: mol_type = other RNA
  misc_feature 1..10: note = Description of sequence: Splice site sequence
gaggcaataa

SEQ ID NO: 4538 - RNA, 10 nt, synthetic construct
  source 1..10: mol_type = other RNA
  misc_feature 1..10: note = Description of sequence: Splice site sequence
gtggtaaagc

SEQ ID NO: 4539 - RNA, 10 nt, synthetic construct
  source 1..10: mol_type = other RNA
  misc_feature 1..10: note = Description of sequence: Splice site sequence
ctggtgggcg

SEQ ID NO: 4540 - RNA, 10 nt, synthetic construct
  source 1..10: mol_type = other RNA
  misc_feature 1..10: note = Description of sequence: Splice site sequence
tcggtcagca

SEQ ID NO: 4541 - RNA, 10 nt, synthetic construct
  source 1..10: mol_type = other RNA
  misc_feature 1..10: note = Description of sequence: Splice site sequence
atggtgatta

SEQ ID NO: 4542 - RNA, 10 nt, synthetic construct
  source 1..10: mol_type = other RNA
  misc_feature 1..10: note = Description of sequence: Splice site sequence
cgagtgtgta

SEQ ID NO: 4543 - RNA, 10 nt, synthetic construct
  source 1..10: mol_type = other RNA
  misc_feature 1..10: note = Description of sequence: Splice site sequence
agcgcaagta

SEQ ID NO: 4544 - RNA, 10 nt, synthetic construct
  source 1..10: mol_type = other RNA
  misc_feature 1..10: note = Description of sequence: Splice site sequence
tgggtacgtt

SEQ ID NO: 4545 - RNA, 10 nt, synthetic construct
  source 1..10: mol_type = other RNA
  misc_feature 1..10: note = Description of sequence: Splice site sequence
agtgtacata

SEQ ID NO: 4546 - RNA, 10 nt, synthetic construct
  source 1..10: mol_type = other RNA
  misc_feature 1..10: note = Description of sequence: Splice site sequence
acagtaggtt

SEQ ID NO: 4547 - RNA, 10 nt, synthetic construct
  source 1..10: mol_type = other RNA
  misc_feature 1..10: note = Description of sequence: Splice site sequence
ttggtgaagt

SEQ ID NO: 4548 - RNA, 10 nt, synthetic construct
  source 1..10: mol_type = other RNA
  misc_feature 1..10: note = Description of sequence: Splice site sequence
tgggtaagga

SEQ ID NO: 4549 - RNA, 10 nt, synthetic construct
  source 1..10: mol_type = other RNA
  misc_feature 1..10: note = Description of sequence: Splice site sequence
taggtgcctt

SEQ ID NO: 4550 - RNA, 10 nt, synthetic construct
  source 1..10: mol_type = other RNA
  misc_feature 1..10: note = Description of sequence: Splice site sequence
cctgtgggtg

SEQ ID NO: 4551 - RNA, 10 nt, synthetic construct
  source 1..10: mol_type = other RNA
  misc_feature 1..10: note = Description of sequence: Splice site sequence
tccgtaagtt

SEQ ID NO: 4552 - RNA, 10 nt, synthetic construct
  source 1..10: mol_type = other RNA
  misc_feature 1..10: note = Description of sequence: Splice site sequence
gtggtaaacg

SEQ ID NO: 4553 - RNA, 10 nt, synthetic construct
  source 1..10: mol_type = other RNA
  misc_feature 1..10: note = Description of sequence: Splice site sequence
cgggtgcggt

SEQ ID NO: 4554 - RNA, 10 nt, synthetic construct
  source 1..10: mol_type = other RNA
  misc_feature 1..10: note = Description of sequence: Splice site sequence
catgtacttc

SEQ ID NO: 4555 - RNA, 10 nt, synthetic construct
  source 1..10: mol_type = other RNA
  misc_feature 1..10: note = Description of sequence: Splice site sequence
agagtaaagg

SEQ ID NO: 4556 - RNA, 10 nt, synthetic construct
  source 1..10: mol_type = other RNA
  misc_feature 1..10: note = Description of sequence: Splice site sequence
cgcgtgagta

SEQ ID NO: 4557 - RNA, 10 nt, synthetic construct
  source 1..10: mol_type = other RNA
  misc_feature 1..10: note = Description of sequence: Splice site sequence
agagtgggca

SEQ ID NO: 4558 - RNA, 10 nt, synthetic construct
  source 1..10: mol_type = other RNA
  misc_feature 1..10: note = Description of sequence: Splice site sequence
agagtaagcc

SEQ ID NO: 4559 - RNA, 10 nt, synthetic construct
  source 1..10: mol_type = other RNA
  misc_feature 1..10: note = Description of sequence: Splice site sequence
agagtaaaca

SEQ ID NO: 4560 - RNA, 10 nt, synthetic construct
  source 1..10: mol_type = other RNA
  misc_feature 1..10: note = Description of sequence: Splice site sequence
gtggttatga

SEQ ID NO: 4561 - RNA, 10 nt, synthetic construct
  source 1..10: mol_type = other RNA
  misc_feature 1..10: note = Description of sequence: Splice site sequence
agggtaataa

SEQ ID NO: 4562 - RNA, 10 nt, synthetic construct
  source 1..10: mol_type = other RNA
  misc_feature 1..10: note = Description of sequence: Splice site sequence
tgagtaagac

SEQ ID NO: 4563 - RNA, 10 nt, synthetic construct
  source 1..10: mol_type = other RNA
  misc_feature 1..10: note = Description of sequence: Splice site sequence
agagtttgtt

SEQ ID NO: 4564 - RNA, 10 nt, synthetic construct
  source 1..10: mol_type = other RNA
  misc_feature 1..10: note = Description of sequence: Splice site sequence
cgggtctgca

SEQ ID NO: 4565 - RNA, 10 nt, synthetic construct
  source 1..10: mol_type = other RNA
  misc_feature 1..10: note = Description of sequence: Splice site sequence
caggtaagtc

SEQ ID NO: 4566 - RNA, 10 nt, synthetic construct
  source 1..10: mol_type = other RNA
  misc_feature 1..10: note = Description of sequence: Splice site sequence
aaggtagaat

SEQ ID NO: 4567 - RNA, 10 nt, synthetic construct
  source 1..10: mol_type = other RNA
  misc_feature 1..10: note = Description of sequence: Splice site sequence
caggtccctc

SEQ ID NO: 4568 - RNA, 10 nt, synthetic construct
  source 1..10: mol_type = other RNA
  misc_feature 1..10: note = Description of sequence: Splice site sequence
agagtaatgg

SEQ ID NO: 4569 - RNA, 10 nt, synthetic construct
  source 1..10: mol_type = other RNA
  misc_feature 1..10: note = Description of sequence: Splice site sequence
gaggtctaag

SEQ ID NO: 4570 - RNA, 10 nt, synthetic construct
  source 1..10: mol_type = other RNA
  misc_feature 1..10: note = Description of sequence: Splice site sequence
agagtagagt

SEQ ID NO: 4571 - RNA, 10 nt, synthetic construct
  source 1..10: mol_type = other RNA
  misc_feature 1..10: note = Description of sequence: Splice site sequence
atggtcagta

SEQ ID NO: 4572 - RNA, 10 nt, synthetic construct
  source 1..10: mol_type = other RNA
  misc_feature 1..10: note = Description of sequence: Splice site sequence
gaggcctggg

SEQ ID NO: 4573 - RNA, 10 nt, synthetic construct
  source 1..10: mol_type = other RNA
  misc_feature 1..10: note = Description of sequence: Splice site sequence
aaggtgtggc

SEQ ID NO: 4574 - RNA, 10 nt, synthetic construct
  source 1..10: mol_type = other RNA
  misc_feature 1..10: note = Description of sequence: Splice site sequence
agagtgatct

SEQ ID NO: 4575 - RNA, 10 nt, synthetic construct
  source 1..10: mol_type = other RNA
  misc_feature 1..10: note = Description of sequence: Splice site sequence
aaggtatcca

SEQ ID NO: 4576 - RNA, 10 nt, synthetic construct
  source 1..10: mol_type = other RNA
  misc_feature 1..10: note = Description of sequence: Splice site sequence
ttcgtaagta

SEQ ID NO: 4577 - RNA, 10 nt, synthetic construct
  source 1..10: mol_type = other RNA
  misc_feature 1..10: note = Description of sequence: Splice site sequence
taagtgggtg

SEQ ID NO: 4578 - RNA, 10 nt, synthetic construct
  source 1..10: mol_type = other RNA
  misc_feature 1..10: note = Description of sequence: Splice site sequence
gccgtgaacg

SEQ ID NO: 4579 - RNA, 10 nt, synthetic construct
  source 1..10: mol_type = other RNA
  misc_feature 1..10: note = Description of sequence: Splice site sequence
gaggttgtgg

SEQ ID NO: 4580 - RNA, 10 nt, synthetic construct
  source 1..10: mol_type = other RNA
  misc_feature 1..10: note = Description of sequence: Splice site sequence
tatgtatgca

SEQ ID NO: 4581 - RNA, 10 nt, synthetic construct
  source 1..10: mol_type = other RNA
  misc_feature 1..10: note = Description of sequence: Splice site sequence
tgtgtaacaa

SEQ ID NO: 4582 - RNA, 10 nt, synthetic construct
  source 1..10: mol_type = other RNA
  misc_feature 1..10: note = Description of sequence: Splice site sequence
agggtattag

SEQ ID NO: 4583 - RNA, 10 nt, synthetic construct
  source 1..10: mol_type = other RNA
  misc_feature 1..10: note = Description of sequence: Splice site sequence
tgagtatatc

SEQ ID NO: 4584 - RNA, 10 nt, synthetic construct
  source 1..10: mol_type = other RNA
  misc_feature 1..10: note = Description of sequence: Splice site sequence
agagtttgtg

SEQ ID NO: 4585 - RNA, 10 nt, synthetic construct
  source 1..10: mol_type = other RNA
  misc_feature 1..10: note = Description of sequence: Splice site sequence
gaggtcgctg

SEQ ID NO: 4586 - RNA, 10 nt, synthetic construct
  source 1..10: mol_type = other RNA
  misc_feature 1..10: note = Description of sequence: Splice site sequence
gaggtcatcg

SEQ ID NO: 4587 - RNA, 10 nt, synthetic construct
  source 1..10: mol_type = other RNA
  misc_feature 1..10: note = Description of sequence: Splice site sequence
acggtaaagc

SEQ ID NO: 4588 - RNA, 10 nt, synthetic construct
  source 1..10: mol_type = other RNA
  misc_feature 1..10: note = Description of sequence: Splice site sequence
tgagtacttg

SEQ ID NO: 4589 - RNA, 10 nt, synthetic construct
  source 1..10: mol_type = other RNA
  misc_feature 1..10: note = Description of sequence: Splice site sequence
cgagtcgccg

SEQ ID NO: 4590 - RNA, 10 nt, synthetic construct
  source 1..10: mol_type = other RNA
  misc_feature 1..10: note = Description of sequence: Splice site sequence
ctggtacgtc

SEQ ID NO: 4591 - RNA, 10 nt, synthetic construct
  source 1..10: mol_type = other RNA
  misc_feature 1..10: note = Description of sequence: Splice site sequence
agggtattgc

SEQ ID NO: 4592 - RNA, 10 nt, synthetic construct
  source 1..10: mol_type = other RNA
  misc_feature 1..10: note = Description of sequence: Splice site sequence
gaagtgaatg

SEQ ID NO: 4593 - RNA, 10 nt, synthetic construct
  source 1..10: mol_type = other RNA
  misc_feature 1..10: note = Description of sequence: Splice site sequence
cagatgagtc

SEQ ID NO: 4594 - RNA, 10 nt, synthetic construct
  source 1..10: mol_type = other RNA
  misc_feature 1..10: note = Description of sequence: Splice site sequence
tgggtattgg

SEQ ID NO: 4595 - RNA, 10 nt, synthetic construct
  source 1..10: mol_type = other RNA
  misc_feature 1..10: note = Description of sequence: Splice site sequence
tgagtaaaga

SEQ ID NO: 4596 - RNA, 10 nt, synthetic construct
  source 1..10: mol_type = other RNA
  misc_feature 1..10: note = Description of sequence: Splice site sequence
gtggttcctg

SEQ ID NO: 4597 - RNA, 10 nt, synthetic construct
  source 1..10: mol_type = other RNA
  misc_feature 1..10: note = Description of sequence: Splice site sequence
tgagcaagta

SEQ ID NO: 4598 - RNA, 10 nt, synthetic construct
  source 1..10: mol_type = other RNA
  misc_feature 1..10: note = Description of sequence: Splice site sequence
tatgtaagag

SEQ ID NO: 4599 - RNA, 10 nt, synthetic construct
  source 1..10: mol_type = other RNA
  misc_feature 1..10: note = Description of sequence: Splice site sequence
aaggtcttgc

SEQ ID NO: 4600 - RNA, 10 nt, synthetic construct
  source 1..10: mol_type = other RNA
  misc_feature 1..10: note = Description of sequence: Splice site sequence
aaagcatgtg

SEQ ID NO: 4601 - RNA, 10 nt, synthetic construct
  source 1..10: mol_type = other RNA
  misc_feature 1..10: note = Description of sequence: Splice site sequence
agagtacagt

SEQ ID NO: 4602 - RNA, 10 nt, synthetic construct
  source 1..10: mol_type = other RNA
  misc_feature 1..10: note = Description of sequence: Splice site sequence
gtggtaatcc

SEQ ID NO: 4603 - RNA, 10 nt, synthetic construct
  source 1..10: mol_type = other RNA
  misc_feature 1..10: note = Description of sequence: Splice site sequence
caggtagagg

SEQ ID NO: 4604 - RNA, 10 nt, synthetic construct
  source 1..10: mol_type = other RNA
  misc_feature 1..10: note = Description of sequence: Splice site sequence
aaggtacaac

SEQ ID NO: 4605 - RNA, 10 nt, synthetic construct
  source 1..10: mol_type = other RNA
  misc_feature 1..10: note = Description of sequence: Splice site sequence
tgggcagcat

SEQ ID NO: 4606 - RNA, 10 nt, synthetic construct
  source 1..10: mol_type = other RNA
  misc_feature 1..10: note = Description of sequence: Splice site sequence
ccggtcatca

SEQ ID NO: 4607 - RNA, 10 nt, synthetic construct
  source 1..10: mol_type = other RNA
  misc_feature 1..10: note = Description of sequence: Splice site sequence
ccggtttgta

SEQ ID NO: 4608 - RNA, 10 nt, synthetic construct
  source 1..10: mol_type = other RNA
  misc_feature 1..10: note = Description of sequence: Splice site sequence
tgagtaaggg

SEQ ID NO: 4609 - RNA, 10 nt, synthetic construct
  source 1..10: mol_type = other RNA
  misc_feature 1..10: note = Description of sequence: Splice site sequence
gaagtatgta

SEQ ID NO: 4610 - RNA, 10 nt, synthetic construct
  source 1..10: mol_type = other RNA
  misc_feature 1..10: note = Description of sequence: Splice site sequence
ggggtagctc

SEQ ID NO: 4611 - RNA, 10 nt, synthetic construct
  source 1..10: mol_type = other RNA
  misc_feature 1..10: note = Description of sequence: Splice site sequence
gctgtacata

SEQ ID NO: 4612 - RNA, 10 nt, synthetic construct
  source 1..10: mol_type = other RNA
  misc_feature 1..10: note = Description of sequence: Splice site sequence
ctggtctctt

SEQ ID NO: 4613 - RNA, 10 nt, synthetic construct
  source 1..10: mol_type = other RNA
  misc_feature 1..10: note = Description of sequence: Splice site sequence
gtggtaaatg

SEQ ID NO: 4614 - RNA, 10 nt, synthetic construct
  source 1..10: mol_type = other RNA
  misc_feature 1..10: note = Description of sequence: Splice site sequence
atcgtaagtg

SEQ ID NO: 4615 - RNA, 10 nt, synthetic construct
  source 1..10: mol_type = other RNA
  misc_feature 1..10: note = Description of sequence: Splice site sequence
gaggcatgta

SEQ ID NO: 4616 - RNA, 10 nt, synthetic construct
  source 1..10: mol_type = other RNA
  misc_feature 1..10: note = Description of sequence: Splice site sequence
aaggtctccc

SEQ ID NO: 4617 - RNA, 10 nt, synthetic construct
  source 1..10: mol_type = other RNA
  misc_feature 1..10: note = Description of sequence: Splice site sequence
tgggtgcgtt

SEQ ID NO: 4618 - RNA, 10 nt, synthetic construct
  source 1..10: mol_type = other RNA
  misc_feature 1..10: note = Description of sequence: Splice site sequence
tgtgtaggtt

SEQ ID NO: 4619 - RNA, 10 nt, synthetic construct
  source 1..10: mol_type = other RNA
  misc_feature 1..10: note = Description of sequence: Splice site sequence
gaagtgagca

SEQ ID NO: 4620 - RNA, 10 nt, synthetic construct
  source 1..10: mol_type = other RNA
  misc_feature 1..10: note = Description of sequence: Splice site sequence
ggtgtaattt

SEQ ID NO: 4621 - RNA, 10 nt, synthetic construct
  source 1..10: mol_type = other RNA
  misc_feature 1..10: note = Description of sequence: Splice site sequence
ctggtgaaat

SEQ ID NO: 4622 - RNA, 10 nt, synthetic construct
  source 1..10: mol_type = other RNA
  misc_feature 1..10: note = Description of sequence: Splice site sequence
atcgtaagtc

SEQ ID NO: 4623 - RNA, 10 nt, synthetic construct
  source 1..10: mol_type = other RNA
  misc_feature 1..10: note = Description of sequence: Splice site sequence
agagtaatcc

SEQ ID NO: 4624 - RNA, 10 nt, synthetic construct
  source 1..10: mol_type = other RNA
  misc_feature 1..10: note = Description of sequence: Splice site sequence
ggagtaggtc

SEQ ID NO: 4625 - RNA, 10 nt, synthetic construct
  source 1..10: mol_type = other RNA
  misc_feature 1..10: note = Description of sequence: Splice site sequence
gaggtaccaa

SEQ ID NO: 4626 - RNA, 10 nt, synthetic construct
  source 1..10: mol_type = other RNA
  misc_feature 1..10: note = Description of sequence: Splice site sequence
cttgtaggtg

SEQ ID NO: 4627 - RNA, 10 nt, synthetic construct
  source 1..10: mol_type = other RNA
  misc_feature 1..10: note = Description of sequence: Splice site sequence
aaggtataag

SEQ ID NO: 4628 - RNA, 10 nt, synthetic construct
  source 1..10: mol_type = other RNA
  misc_feature 1..10: note = Description of sequence: Splice site sequence
agagttggta

SEQ ID NO: 4629 - RNA, 10 nt, synthetic construct
  source 1..10: mol_type = other RNA
  misc_feature 1..10: note = Description of sequence: Splice site sequence
atggtttgtg

SEQ ID NO: 4630 - RNA, 10 nt, synthetic construct
  source 1..10: mol_type = other RNA
  misc_feature 1..10: note = Description of sequence: Splice site sequence
tgggtcagat

SEQ ID NO: 4631 - RNA, 10 nt, synthetic construct
  source 1..10: mol_type = other RNA
  misc_feature 1..10: note = Description of sequence: Splice site sequence
agagtaggac

SEQ ID NO: 4632 - RNA, 10 nt, synthetic construct
  source 1..10: mol_type = other RNA
  misc_feature 1..10: note = Description of sequence: Splice site sequence
agagtagtgt

SEQ ID NO: 4633 - RNA, 10 nt, synthetic construct
  source 1..10: mol_type = other RNA
  misc_feature 1..10: note = Description of sequence: Splice site sequence
agagtaggag

SEQ ID NO: 4634 - RNA, 10 nt, synthetic construct
  source 1..10: mol_type = other RNA
  misc_feature 1..10: note = Description of sequence: Splice site sequence
caggtctcta

SEQ ID NO: 4635 - RNA, 10 nt, synthetic construct
  source 1..10: mol_type = other RNA
  misc_feature 1..10: note = Description of sequence: Splice site sequence
aaggtggatg

SEQ ID NO: 4636 - RNA, 10 nt, synthetic construct
  source 1..10: mol_type = other RNA
  misc_feature 1..10: note = Description of sequence: Splice site sequence
tgggtatcaa

SEQ ID NO: 4637 - RNA, 10 nt, synthetic construct
  source 1..10: mol_type = other RNA
  misc_feature 1..10: note = Description of sequence: Splice site sequence
gatgtatgga

SEQ ID NO: 4638 - RNA, 10 nt, synthetic construct
  source 1..10: mol_type = other RNA
  misc_feature 1..10: note = Description of sequence: Splice site sequence
aaggtgtttc

SEQ ID NO: 4639 - RNA, 10 nt, synthetic construct
  source 1..10: mol_type = other RNA
  misc_feature 1..10: note = Description of sequence: Splice site sequence
gcagtgtaaa

SEQ ID NO: 4640 - RNA, 10 nt, synthetic construct
  source 1..10: mol_type = other RNA
  misc_feature 1..10: note = Description of sequence: Splice site sequence
ttagtatgta

SEQ ID NO: 4641 - RNA, 10 nt, synthetic construct
  source 1..10: mol_type = other RNA
  misc_feature 1..10: note = Description of sequence: Splice site sequence
tctgtatgca

SEQ ID NO: 4642 - RNA, 10 nt, synthetic construct
  source 1..10: mol_type = other RNA
  misc_feature 1..10: note = Description of sequence: Splice site sequence
aatgtaaaat

SEQ ID NO: 4643 - RNA, 10 nt, synthetic construct
  source 1..10: mol_type = other RNA
  misc_feature 1..10: note = Description of sequence: Splice site sequence
agagtaaatt

SEQ ID NO: 4644 - RNA, 10 nt, synthetic construct
  source 1..10: mol_type = other RNA
  misc_feature 1..10: note = Description of sequence: Splice site sequence
ggggtacttt

SEQ ID NO: 4645 - RNA, 10 nt, synthetic construct
  source 1..10: mol_type = other RNA
  misc_feature 1..10: note = Description of sequence: Splice site sequence
gaagtttgat

SEQ ID NO: 4646 - RNA, 10 nt, synthetic construct
  source 1..10: mol_type = other RNA
  misc_feature 1..10: note = Description of sequence: Splice site sequence
aaagtagatt

SEQ ID NO: 4647 - RNA, 10 nt, synthetic construct
  source 1..10: mol_type = other RNA
  misc_feature 1..10: note = Description of sequence: Splice site sequence
tgtgtagagt

SEQ ID NO: 4648 - RNA, 10 nt, synthetic construct
  source 1..10: mol_type = other RNA
  misc_feature 1..10: note = Description of sequence: Splice site sequence
tgggtaagcg

SEQ ID NO: 4649 - RNA, 10 nt, synthetic construct
  source 1..10: mol_type = other RNA
  misc_feature 1..10: note = Description of sequence: Splice site sequence
cgggttcagg

SEQ ID NO: 4650 - RNA, 10 nt, synthetic construct
  source 1..10: mol_type = other RNA
  misc_feature 1..10: note = Description of sequence: Splice site sequence
agggtacgac

SEQ ID NO: 4651 - RNA, 10 nt, synthetic construct
  source 1..10: mol_type = other RNA
  misc_feature 1..10: note = Description of sequence: Splice site sequence
tcggtaagaa

SEQ ID NO: 4652 - RNA, 10 nt, synthetic construct
  source 1..10: mol_type = other RNA
  misc_feature 1..10: note = Description of sequence: Splice site sequence
agggttggca

SEQ ID NO: 4653 - RNA, 10 nt, synthetic construct
  source 1..10: mol_type = other RNA
  misc_feature 1..10: note = Description of sequence: Splice site sequence
aaagtacagt

SEQ ID NO: 4654 - RNA, 10 nt, synthetic construct
  source 1..10: mol_type = other RNA
  misc_feature 1..10: note = Description of sequence: Splice site sequence
taagttaagg

SEQ ID NO: 4655 - RNA, 10 nt, synthetic construct
  source 1..10: mol_type = other RNA
  misc_feature 1..10: note = Description of sequence: Splice site sequence
atggtaatgt

SEQ ID NO: 4656 - RNA, 10 nt, synthetic construct
  source 1..10: mol_type = other RNA
  misc_feature 1..10: note = Description of sequence: Splice site sequence
gtggttttac

SEQ ID NO: 4657 - RNA, 10 nt, synthetic construct
  source 1..10: mol_type = other RNA
  misc_feature 1..10: note = Description of sequence: Splice site sequence
agagtaacaa

SEQ ID NO: 4658 - RNA, 10 nt, synthetic construct
  source 1..10: mol_type = other RNA
  misc_feature 1..10: note = Description of sequence: Splice site sequence
aaggtagccc

SEQ ID NO: 4659 - RNA, 10 nt, synthetic construct
  source 1..10: mol_type = other RNA
  misc_feature 1..10: note = Description of sequence: Splice site sequence
gcggtgaggc

SEQ ID NO: 4660 - RNA, 10 nt, synthetic construct
  source 1..10: mol_type = other RNA
  misc_feature 1..10: note = Description of sequence: Splice site sequence
atggttcagc

SEQ ID NO: 4661 - RNA, 10 nt, synthetic construct
  source 1..10: mol_type = other RNA
  misc_feature 1..10: note = Description of sequence: Splice site sequence
aaggtactta

SEQ ID NO: 4662 - RNA, 10 nt, synthetic construct
  source 1..10: mol_type = other RNA
  misc_feature 1..10: note = Description of sequence: Splice site sequence
aaggtccgtg

SEQ ID NO: 4663 - RNA, 10 nt, synthetic construct
  source 1..10: mol_type = other RNA
  misc_feature 1..10: note = Description of sequence: Splice site sequence
taggtaagcg

SEQ ID NO: 4664 - RNA, 10 nt, synthetic construct
  source 1..10: mol_type = other RNA
  misc_feature 1..10: note = Description of sequence: Splice site sequence
atggtacctt

SEQ ID NO: 4665 - RNA, 10 nt, synthetic construct
  source 1..10: mol_type = other RNA
  misc_feature 1..10: note = Description of sequence: Splice site sequence
gccgtggtgg

SEQ ID NO: 4666 - RNA, 10 nt, synthetic construct
  source 1..10: mol_type = other RNA
  misc_feature 1..10: note = Description of sequence: Splice site sequence
ctggtgcgtc

SEQ ID NO: 4667 - RNA, 10 nt, synthetic construct
  source 1..10: mol_type = other RNA
  misc_feature 1..10: note = Description of sequence: Splice site sequence
caggtggaaa

SEQ ID NO: 4668 - RNA, 10 nt, synthetic construct
  source 1..10: mol_type = other RNA
  misc_feature 1..10: note = Description of sequence: Splice site sequence
aaagtctgta

SEQ ID NO: 4669 - RNA, 10 nt, synthetic construct
  source 1..10: mol_type = other RNA
  misc_feature 1..10: note = Description of sequence: Splice site sequence
gaggtaaccc

SEQ ID NO: 4670 - RNA, 10 nt, synthetic construct
  source 1..10: mol_type = other RNA
  misc_feature 1..10: note = Description of sequence: Splice site sequence
agagtatggg

SEQ ID NO: 4671 - RNA, 10 nt, synthetic construct
  source 1..10: mol_type = other RNA
  misc_feature 1..10: note = Description of sequence: Splice site sequence
tatgcccctg

SEQ ID NO: 4672 - RNA, 10 nt, synthetic construct
  source 1..10: mol_type = other RNA
  misc_feature 1..10: note = Description of sequence: Splice site sequence
aaggtgccag

SEQ ID NO: 4673 - RNA, 10 nt, synthetic construct
  source 1..10: mol_type = other RNA
  misc_feature 1..10: note = Description of sequence: Splice site sequence
acggtgcggc

SEQ ID NO: 4674 - RNA, 10 nt, synthetic construct
  source 1..10: mol_type = other RNA
  misc_feature 1..10: note = Description of sequence: Splice site sequence
agggtactga

SEQ ID NO: 4675 - RNA, 10 nt, synthetic construct
  source 1..10: mol_type = other RNA
  misc_feature 1..10: note = Description of sequence: Splice site sequence
agagtaagcg

SEQ ID NO: 4676 - RNA, 10 nt, synthetic construct
  source 1..10: mol_type = other RNA
  misc_feature 1..10: note = Description of sequence: Splice site sequence
ctggcaaggg

SEQ ID NO: 4677 - RNA, 10 nt, synthetic construct
  source 1..10: mol_type = other RNA
  misc_feature 1..10: note = Description of sequence: Splice site sequence
ccagtgtgtg

SEQ ID NO: 4678 - RNA, 10 nt, synthetic construct
  source 1..10: mol_type = other RNA
  misc_feature 1..10: note = Description of sequence: Splice site sequence
gaggtagacg

SEQ ID NO: 4679 - RNA, 10 nt, synthetic construct
  source 1..10: mol_type = other RNA
  misc_feature 1..10: note = Description of sequence: Splice site sequence
cgggtgcggg

SEQ ID NO: 4680 - RNA, 10 nt, synthetic construct
  source 1..10: mol_type = other RNA
  misc_feature 1..10: note = Description of sequence: Splice site sequence
gatgtaagct

SEQ ID NO: 4681 - RNA, 10 nt, synthetic construct
  source 1..10: mol_type = other RNA
  misc_feature 1..10: note = Description of sequence: Splice site sequence
attgtattta

SEQ ID NO: 4682 - RNA, 10 nt, synthetic construct
  source 1..10: mol_type = other RNA
  misc_feature 1..10: note = Description of sequence: Splice site sequence
tgcgtgagtg

SEQ ID NO: 4683 - RNA, 10 nt, synthetic construct
  source 1..10: mol_type = other RNA
  misc_feature 1..10: note = Description of sequence: Splice site sequence
ctggtctata

SEQ ID NO: 4684 - RNA, 10 nt, synthetic construct
  source 1..10: mol_type = other RNA
  misc_feature 1..10: note = Description of sequence: Splice site sequence
gaggtgctag

SEQ ID NO: 4685 - RNA, 10 nt, synthetic construct
  source 1..10: mol_type = other RNA
  misc_feature 1..10: note = Description of sequence: Splice site sequence
gaggtgccat

SEQ ID NO: 4686 - RNA, 10 nt, synthetic construct
  source 1..10: mol_type = other RNA
  misc_feature 1..10: note = Description of sequence: Splice site sequence
caggtacgtc

SEQ ID NO: 4687 - RNA, 10 nt, synthetic construct
  source 1..10: mol_type = other RNA
  misc_feature 1..10: note = Description of sequence: Splice site sequence
gaggttcagc

SEQ ID NO: 4688 - RNA, 10 nt, synthetic construct
  source 1..10: mol_type = other RNA
  misc_feature 1..10: note = Description of sequence: Splice site sequence
aacgtaagaa

SEQ ID NO: 4689 - RNA, 10 nt, synthetic construct
  source 1..10: mol_type = other RNA
  misc_feature 1..10: note = Description of sequence: Splice site sequence
agagtagtac

SEQ ID NO: 4690 - RNA, 10 nt, synthetic construct
  source 1..10: mol_type = other RNA
  misc_feature 1..10: note = Description of sequence: Splice site sequence
aaggtaacgg

SEQ ID NO: 4691 - RNA, 10 nt, synthetic construct
  source 1..10: mol_type = other RNA
  misc_feature 1..10: note = Description of sequence: Splice site sequence
taggtgtgac

SEQ ID NO: 4692 - RNA, 10 nt, synthetic construct
  source 1..10: mol_type = other RNA
  misc_feature 1..10: note = Description of sequence: Splice site sequence
ccggtaatag

SEQ ID NO: 4693 - RNA, 10 nt, synthetic construct
  source 1..10: mol_type = other RNA
  misc_feature 1..10: note = Description of sequence: Splice site sequence
caggtaccag

SEQ ID NO: 4694 - RNA, 10 nt, synthetic construct
  source 1..10: mol_type = other RNA
  misc_feature 1..10: note = Description of sequence: Splice site sequence
tttgtaattg

SEQ ID NO: 4695 - RNA, 10 nt, synthetic construct
  source 1..10: mol_type = other RNA
  misc_feature 1..10: note = Description of sequence: Splice site sequence
aatgtacgaa

SEQ ID NO: 4696 - RNA, 10 nt, synthetic construct
  source 1..10: mol_type = other RNA
  misc_feature 1..10: note = Description of sequence: Splice site sequence
caggtaatga

SEQ ID NO: 4697 - RNA, 10 nt, synthetic construct
  source 1..10: mol_type = other RNA
  misc_feature 1..10: note = Description of sequence: Splice site sequence
atcgtcaagg

SEQ ID NO: 4698 - RNA, 10 nt, synthetic construct
  source 1..10: mol_type = other RNA
  misc_feature 1..10: note = Description of sequence: Splice site sequence
ctggtagatg

SEQ ID NO: 4699 - RNA, 10 nt, synthetic construct
  source 1..10: mol_type = other RNA
  misc_feature 1..10: note = Description of sequence: Splice site sequence
ggggtgcagt

SEQ ID NO: 4700 - RNA, 10 nt, synthetic construct
  source 1..10: mol_type = other RNA
  misc_feature 1..10: note = Description of sequence: Splice site sequence
agtgtgagaa

SEQ ID NO: 4701 - RNA, 10 nt, synthetic construct
  source 1..10: mol_type = other RNA
  misc_feature 1..10: note = Description of sequence: Splice site sequence
ggggttttat

SEQ ID NO: 4702 - RNA, 10 nt, synthetic construct
  source 1..10: mol_type = other RNA
  misc_feature 1..10: note = Description of sequence: Splice site sequence
cctgtcccct

SEQ ID NO: 4703 - RNA, 10 nt, synthetic construct
  source 1..10: mol_type = other RNA
  misc_feature 1..10: note = Description of sequence: Splice site sequence
attgtgaagt

SEQ ID NO: 4704 - RNA, 10 nt, synthetic construct
  source 1..10: mol_type = other RNA
  misc_feature 1..10: note = Description of sequence: Splice site sequence
aaggtaaacg

SEQ ID NO: 4705 - RNA, 10 nt, synthetic construct
  source 1..10: mol_type = other RNA
  misc_feature 1..10: note = Description of sequence: Splice site sequence
tacgtcgtgg

SEQ ID NO: 4706 - RNA, 10 nt, synthetic construct
  source 1..10: mol_type = other RNA
  misc_feature 1..10: note = Description of sequence: Splice site sequence
aaggtgccat

SEQ ID NO: 4707 - RNA, 10 nt, synthetic construct
  source 1..10: mol_type = other RNA
  misc_feature 1..10: note = Description of sequence: Splice site sequence
ggggtcccag

SEQ ID NO: 4708 - RNA, 10 nt, synthetic construct
  source 1..10: mol_type = other RNA
  misc_feature 1..10: note = Description of sequence: Splice site sequence
tatgtatggt

SEQ ID NO: 4709 - RNA, 10 nt, synthetic construct
  source 1..10: mol_type = other RNA
  misc_feature 1..10: note = Description of sequence: Splice site sequence
cgggtaatta

SEQ ID NO: 4710 - RNA, 10 nt, synthetic construct
  source 1..10: mol_type = other RNA
  misc_feature 1..10: note = Description of sequence: Splice site sequence
cgggtactcc

SEQ ID NO: 4711 - RNA, 10 nt, synthetic construct
  source 1..10: mol_type = other RNA
  misc_feature 1..10: note = Description of sequence: Splice site sequence
caggtgactt

SEQ ID NO: 4712 - RNA, 10 nt, synthetic construct
  source 1..10: mol_type = other RNA
  misc_feature 1..10: note = Description of sequence: Splice site sequence
agtgtgggtt

SEQ ID NO: 4713 - RNA, 10 nt, synthetic construct
  source 1..10: mol_type = other RNA
  misc_feature 1..10: note = Description of sequence: Splice site sequence
agagtatggc

SEQ ID NO: 4714 - RNA, 10 nt, synthetic construct
  source 1..10: mol_type = other RNA
  misc_feature 1..10: note = Description of sequence: Splice site sequence
aaggccaaca

SEQ ID NO: 4715 - RNA, 10 nt, synthetic construct
  source 1..10: mol_type = other RNA
  misc_feature 1..10: note = Description of sequence: Splice site sequence
aaagcaagta

SEQ ID NO: 4716 - RNA, 10 nt, synthetic construct
  source 1..10: mol_type = other RNA
  misc_feature 1..10: note = Description of sequence: Splice site sequence
tcagtaggtc

SEQ ID NO: 4717 - RNA, 10 nt, synthetic construct
  source 1..10: mol_type = other RNA
  misc_feature 1..10: note = Description of sequence: Splice site sequence
gtggtggcgg

SEQ ID NO: 4718 - RNA, 10 nt, synthetic construct
  source 1..10: mol_type = other RNA
  misc_feature 1..10: note = Description of sequence: Splice site sequence
catgtatcct

SEQ ID NO: 4719 - RNA, 10 nt, synthetic construct
  source 1..10: mol_type = other RNA
  misc_feature 1..10: note = Description of sequence: Splice site sequence
tcggtgagcc

SEQ ID NO: 4720 - RNA, 10 nt, synthetic construct
  source 1..10: mol_type = other RNA
  misc_feature 1..10: note = Description of sequence: Splice site sequence
atagttgggt

SEQ ID NO: 4721 - RNA, 10 nt, synthetic construct
  source 1..10: mol_type = other RNA
  misc_feature 1..10: note = Description of sequence: Splice site sequence
aatgttagct

SEQ ID NO: 4722 - RNA, 10 nt, synthetic construct
  source 1..10: mol_type = other RNA
  misc_feature 1..10: note = Description of sequence: Splice site sequence
atggtgaatg

SEQ ID NO: 4723 - RNA, 10 nt, synthetic construct
  source 1..10: mol_type = other RNA
  misc_feature 1..10: note = Description of sequence: Splice site sequence
cgggtaatgt

SEQ ID NO: 4724 - RNA, 10 nt, synthetic construct
  source 1..10: mol_type = other RNA
  misc_feature 1..10: note = Description of sequence: Splice site sequence
tctgtaggtg

SEQ ID NO: 4725 - RNA, 10 nt, synthetic construct
  source 1..10: mol_type = other RNA
  misc_feature 1..10: note = Description of sequence: Splice site sequence
ccggtgaggc

SEQ ID NO: 4726 - RNA, 10 nt, synthetic construct
  source 1..10: mol_type = other RNA
  misc_feature 1..10: note = Description of sequence: Splice site sequence
tgagtccact

SEQ ID NO: 4727 - RNA, 10 nt, synthetic construct
  source 1..10: mol_type = other RNA
  misc_feature 1..10: note = Description of sequence: Splice site sequence
ctagtaagag

SEQ ID NO: 4728 - RNA, 10 nt, synthetic construct
  source 1..10: mol_type = other RNA
  misc_feature 1..10: note = Description of sequence: Splice site sequence
cgggtggggc

SEQ ID NO: 4729 - RNA, 10 nt, synthetic construct
  source 1..10: mol_type = other RNA
  misc_feature 1..10: note = Description of sequence: Splice site sequence
cgagtaagca

SEQ ID NO: 4730 - RNA, 10 nt, synthetic construct
  source 1..10: mol_type = other RNA
  misc_feature 1..10: note = Description of sequence: Splice site sequence
tgtgccaatt

SEQ ID NO: 4731 - RNA, 10 nt, synthetic construct
  source 1..10: mol_type = other RNA
  misc_feature 1..10: note = Description of sequence: Splice site sequence
tcggtaagcc

SEQ ID NO: 4732 - RNA, 10 nt, synthetic construct
  source 1..10: mol_type = other RNA
  misc_feature 1..10: note = Description of sequence: Splice site sequence
tatgtaggtg

SEQ ID NO: 4733 - RNA, 10 nt, synthetic construct
  source 1..10: mol_type = other RNA
  misc_feature 1..10: note = Description of sequence: Splice site sequence
ttggtgggcc

SEQ ID NO: 4734 - RNA, 10 nt, synthetic construct
  source 1..10: mol_type = other RNA
  misc_feature 1..10: note = Description of sequence: Splice site sequence
gaggctgggc

SEQ ID NO: 4735 - RNA, 10 nt, synthetic construct
  source 1..10: mol_type = other RNA
  misc_feature 1..10: note = Description of sequence: Splice site sequence
agagtaactt

SEQ ID NO: 4736 - RNA, 10 nt, synthetic construct
  source 1..10: mol_type = other RNA
  misc_feature 1..10: note = Description of sequence: Splice site sequence
acggtaggtc

SEQ ID NO: 4737 - RNA, 10 nt, synthetic construct
  source 1..10: mol_type = other RNA
  misc_feature 1..10: note = Description of sequence: Splice site sequence
caggcccaga

SEQ ID NO: 4738 - RNA, 10 nt, synthetic construct
  source 1..10: mol_type = other RNA
  misc_feature 1..10: note = Description of sequence: Splice site sequence
ccggtgggtt

SEQ ID NO: 4739 - RNA, 10 nt, synthetic construct
  source 1..10: mol_type = other RNA
  misc_feature 1..10: note = Description of sequence: Splice site sequence
aaggtgacgg

SEQ ID NO: 4740 - RNA, 10 nt, synthetic construct
  source 1..10: mol_type = other RNA
  misc_feature 1..10: note = Description of sequence: Splice site sequence
ggggtacagc

SEQ ID NO: 4741 - RNA, 10 nt, synthetic construct
  source 1..10: mol_type = other RNA
  misc_feature 1..10: note = Description of sequence: Splice site sequence
catgtaagtc

SEQ ID NO: 4742 - RNA, 10 nt, synthetic construct
  source 1..10: mol_type = other RNA
  misc_feature 1..10: note = Description of sequence: Splice site sequence
attgtgagaa

SEQ ID NO: 4743 - RNA, 10 nt, synthetic construct
  source 1..10: mol_type = other RNA
  misc_feature 1..10: note = Description of sequence: Splice site sequence
tgtgtaagga

SEQ ID NO: 4744 - RNA, 10 nt, synthetic construct
  source 1..10: mol_type = other RNA
  misc_feature 1..10: note = Description of sequence: Splice site sequence
tttgtaagat

SEQ ID NO: 4745 - RNA, 10 nt, synthetic construct
  source 1..10: mol_type = other RNA
  misc_feature 1..10: note = Description of sequence: Splice site sequence
agggtcattt

SEQ ID NO: 4746 - RNA, 10 nt, synthetic construct
  source 1..10: mol_type = other RNA
  misc_feature 1..10: note = Description of sequence: Splice site sequence
tgggtttgtt

SEQ ID NO: 4747 - RNA, 10 nt, synthetic construct
  source 1..10: mol_type = other RNA
  misc_feature 1..10: note = Description of sequence: Splice site sequence
cgagtaagcc

SEQ ID NO: 4748 - RNA, 10 nt, synthetic construct
  source 1..10: mol_type = other RNA
  misc_feature 1..10: note = Description of sequence: Splice site sequence
gtggtgtgta

SEQ ID NO: 4749 - RNA, 10 nt, synthetic construct
  source 1..10: mol_type = other RNA
  misc_feature 1..10: note = Description of sequence: Splice site sequence
atggtataac

SEQ ID NO: 4750 - RNA, 10 nt, synthetic construct
  source 1..10: mol_type = other RNA
  misc_feature 1..10: note = Description of sequence: Splice site sequence
tgggtacgta

SEQ ID NO: 4751 - RNA, 10 nt, synthetic construct
  source 1..10: mol_type = other RNA
  misc_feature 1..10: note = Description of sequence: Splice site sequence
aaagtagagt

SEQ ID NO: 4752 - RNA, 10 nt, synthetic construct
  source 1..10: mol_type = other RNA
  misc_feature 1..10: note = Description of sequence: Splice site sequence
tcggtaactg

SEQ ID NO: 4753 - RNA, 10 nt, synthetic construct
  source 1..10: mol_type = other RNA
  misc_feature 1..10: note = Description of sequence: Splice site sequence
agagtaatga

SEQ ID NO: 4754 - RNA, 10 nt, synthetic construct
  source 1..10: mol_type = other RNA
  misc_feature 1..10: note = Description of sequence: Splice site sequence
atggtgggtc

SEQ ID NO: 4755 - RNA, 10 nt, synthetic construct
  source 1..10: mol_type = other RNA
  misc_feature 1..10: note = Description of sequence: Splice site sequence
agagtaatat

SEQ ID NO: 4756 - RNA, 10 nt, synthetic construct
  source 1..10: mol_type = other RNA
  misc_feature 1..10: note = Description of sequence: Splice site sequence
caggtactgg

SEQ ID NO: 4757 - RNA, 10 nt, synthetic construct
  source 1..10: mol_type = other RNA
  misc_feature 1..10: note = Description of sequence: Splice site sequence
taagtcagtt

SEQ ID NO: 4758 - RNA, 10 nt, synthetic construct
  source 1..10: mol_type = other RNA
  misc_feature 1..10: note = Description of sequence: Splice site sequence
gcggtagaga

SEQ ID NO: 4759 - RNA, 10 nt, synthetic construct
  source 1..10: mol_type = other RNA
  misc_feature 1..10: note = Description of sequence: Splice site sequence
aaggtgatgg

SEQ ID NO: 4760 - RNA, 10 nt, synthetic construct
  source 1..10: mol_type = other RNA
  misc_feature 1..10: note = Description of sequence: Splice site sequence
acagtatgtt

SEQ ID NO: 4761 - RNA, 10 nt, synthetic construct
  source 1..10: mol_type = other RNA
  misc_feature 1..10: note = Description of sequence: Splice site sequence
gatgtacgtc

SEQ ID NO: 4762 - RNA, 10 nt, synthetic construct
  source 1..10: mol_type = other RNA
  misc_feature 1..10: note = Description of sequence: Splice site sequence
taggtttctc

SEQ ID NO: 4763 - RNA, 10 nt, synthetic construct
  source 1..10: mol_type = other RNA
  misc_feature 1..10: note = Description of sequence: Splice site sequence
gaggcatggg

SEQ ID NO: 4764 - RNA, 10 nt, synthetic construct
  source 1..10: mol_type = other RNA
  misc_feature 1..10: note = Description of sequence: Splice site sequence
atagctaagt

SEQ ID NO: 4765 - RNA, 10 nt, synthetic construct
  source 1..10: mol_type = other RNA
  misc_feature 1..10: note = Description of sequence: Splice site sequence
gtagtctgta

SEQ ID NO: 4766 - RNA, 10 nt, synthetic construct
  source 1..10: mol_type = other RNA
  misc_feature 1..10: note = Description of sequence: Splice site sequence
aaggtgaacg

SEQ ID NO: 4767 - RNA, 10 nt, synthetic construct
  source 1..10: mol_type = other RNA
  misc_feature 1..10: note = Description of sequence: Splice site sequence
gtggtggtcg

SEQ ID NO: 4768 - RNA, 10 nt, synthetic construct
  source 1..10: mol_type = other RNA
  misc_feature 1..10: note = Description of sequence: Splice site sequence
gaggttgatc

SEQ ID NO: 4769 - RNA, 10 nt, synthetic construct
  source 1..10: mol_type = other RNA
  misc_feature 1..10: note = Description of sequence: Splice site sequence
tgagtgggtt

SEQ ID NO: 4770 - RNA, 10 nt, synthetic construct
  source 1..10: mol_type = other RNA
  misc_feature 1..10: note = Description of sequence: Splice site sequence
actgtacgtg

SEQ ID NO: 4771 - RNA, 10 nt, synthetic construct
  source 1..10: mol_type = other RNA
  misc_feature 1..10: note = Description of sequence: Splice site sequence
ctggtgactg

SEQ ID NO: 4772 - RNA, 10 nt, synthetic construct
  source 1..10: mol_type = other RNA
  misc_feature 1..10: note = Description of sequence: Splice site sequence
caagttaagc

SEQ ID NO: 4773 - RNA, 10 nt, synthetic construct
  source 1..10: mol_type = other RNA
  misc_feature 1..10: note = Description of sequence: Splice site sequence
gaggtaccca

SEQ ID NO: 4774 - RNA, 10 nt, synthetic construct
  source 1..10: mol_type = other RNA
  misc_feature 1..10: note = Description of sequence: Splice site sequence
aacgtaactt

SEQ ID NO: 4775 - RNA, 10 nt, synthetic construct
  source 1..10: mol_type = other RNA
  misc_feature 1..10: note = Description of sequence: Splice site sequence
caggttacta

SEQ ID NO: 4776 - RNA, 10 nt, synthetic construct
  source 1..10: mol_type = other RNA
  misc_feature 1..10: note = Description of sequence: Splice site sequence
agagttagtc

SEQ ID NO: 4777 - RNA, 10 nt, synthetic construct
  source 1..10: mol_type = other RNA
  misc_feature 1..10: note = Description of sequence: Splice site sequence
tgggcacgtc

SEQ ID NO: 4778 - RNA, 10 nt, synthetic construct
  source 1..10: mol_type = other RNA
  misc_feature 1..10: note = Description of sequence: Splice site sequence
agtgtatggt

SEQ ID NO: 4779 - RNA, 10 nt, synthetic construct
  source 1..10: mol_type = other RNA
  misc_feature 1..10: note = Description of sequence: Splice site sequence
aaggttgcaa

SEQ ID NO: 4780 - RNA, 10 nt, synthetic construct
  source 1..10: mol_type = other RNA
  misc_feature 1..10: note = Description of sequence: Splice site sequence
caggttgtta

SEQ ID NO: 4781 - RNA, 10 nt, synthetic construct
  source 1..10: mol_type = other RNA
  misc_feature 1..10: note = Description of sequence: Splice site sequence
aaggcatccc

SEQ ID NO: 4782 - RNA, 10 nt, synthetic construct
  source 1..10: mol_type = other RNA
  misc_feature 1..10: note = Description of sequence: Splice site sequence
gatgtaaggc

SEQ ID NO: 4783 - RNA, 10 nt, synthetic construct
  source 1..10: mol_type = other RNA
  misc_feature 1..10: note = Description of sequence: Splice site sequence
agggtacggg

SEQ ID NO: 4784 - RNA, 10 nt, synthetic construct
  source 1..10: mol_type = other RNA
  misc_feature 1..10: note = Description of sequence: Splice site sequence
gaggtcaaag

SEQ ID NO: 4785 - RNA, 10 nt, synthetic construct
  source 1..10: mol_type = other RNA
  misc_feature 1..10: note = Description of sequence: Splice site sequence
caagtgagcg

SEQ ID NO: 4786 - RNA, 10 nt, synthetic construct
  source 1..10: mol_type = other RNA
  misc_feature 1..10: note = Description of sequence: Splice site sequence
agagtaatct

SEQ ID NO: 4787 - RNA, 10 nt, synthetic construct
  source 1..10: mol_type = other RNA
  misc_feature 1..10: note = Description of sequence: Splice site sequence
tcggtagctg

SEQ ID NO: 4788 - RNA, 10 nt, synthetic construct
  source 1..10: mol_type = other RNA
  misc_feature 1..10: note = Description of sequence: Splice site sequence
aaagtagtag

SEQ ID NO: 4789 - RNA, 10 nt, synthetic construct
  source 1..10: mol_type = other RNA
  misc_feature 1..10: note = Description of sequence: Splice site sequence
caggttcgtc

SEQ ID NO: 4790 - RNA, 10 nt, synthetic construct
  source 1..10: mol_type = other RNA
  misc_feature 1..10: note = Description of sequence: Splice site sequence
cgtgtatgaa

SEQ ID NO: 4791 - RNA, 10 nt, synthetic construct
  source 1..10: mol_type = other RNA
  misc_feature 1..10: note = Description of sequence: Splice site sequence
agtgtaaaaa

SEQ ID NO: 4792 - RNA, 10 nt, synthetic construct
  source 1..10: mol_type = other RNA
  misc_feature 1..10: note = Description of sequence: Splice site sequence
aaggtctcac

SEQ ID NO: 4793 - RNA, 10 nt, synthetic construct
  source 1..10: mol_type = other RNA
  misc_feature 1..10: note = Description of sequence: Splice site sequence
taggtggagc

SEQ ID NO: 4794 - RNA, 10 nt, synthetic construct
  source 1..10: mol_type = other RNA
  misc_feature 1..10: note = Description of sequence: Splice site sequence
tgagtaggtg

SEQ ID NO: 4795 - RNA, 10 nt, synthetic construct
  source 1..10: mol_type = other RNA
  misc_feature 1..10: note = Description of sequence: Splice site sequence
agagtatgcc

SEQ ID NO: 4796 - RNA, 10 nt, synthetic construct
  source 1..10: mol_type = other RNA
  misc_feature 1..10: note = Description of sequence: Splice site sequence
gaggttgcat

SEQ ID NO: 4797 - RNA, 10 nt, synthetic construct
  source 1..10: mol_type = other RNA
  misc_feature 1..10: note = Description of sequence: Splice site sequence
caagtaagag

SEQ ID NO: 4798 - RNA, 10 nt, synthetic construct
  source 1..10: mol_type = other RNA
  misc_feature 1..10: note = Description of sequence: Splice site sequence
tctgtgtgcc

SEQ ID NO: 4799 - RNA, 10 nt, synthetic construct
  source 1..10: mol_type = other RNA
  misc_feature 1..10: note = Description of sequence: Splice site sequence
gaggtgatgc

SEQ ID NO: 4800 - RNA, 10 nt, synthetic construct
  source 1..10: mol_type = other RNA
  misc_feature 1..10: note = Description of sequence: Splice site sequence
ggggtgataa

SEQ ID NO: 4801 - RNA, 10 nt, synthetic construct
  source 1..10: mol_type = other RNA
  misc_feature 1..10: note = Description of sequence: Splice site sequence
cccgtgagcc

SEQ ID NO: 4802 - RNA, 10 nt, synthetic construct
  source 1..10: mol_type = other RNA
  misc_feature 1..10: note = Description of sequence: Splice site sequence
agagtaactg

SEQ ID NO: 4803 - RNA, 10 nt, synthetic construct
  source 1..10: mol_type = other RNA
  misc_feature 1..10: note = Description of sequence: Splice site sequence
gcggtaagta

SEQ ID NO: 4804 - RNA, 10 nt, synthetic construct
  source 1..10: mol_type = other RNA
  misc_feature 1..10: note = Description of sequence: Splice site sequence
agagtacatc

SEQ ID NO: 4805 - RNA, 10 nt, synthetic construct
  source 1..10: mol_type = other RNA
  misc_feature 1..10: note = Description of sequence: Splice site sequence
tcggtctggg

SEQ ID NO: 4806 - RNA, 10 nt, synthetic construct
  source 1..10: mol_type = other RNA
  misc_feature 1..10: note = Description of sequence: Splice site sequence
taagtatctc

SEQ ID NO: 4807 - RNA, 10 nt, synthetic construct
  source 1..10: mol_type = other RNA
  misc_feature 1..10: note = Description of sequence: Splice site sequence
ggcgtaggtt

SEQ ID NO: 4808 - RNA, 10 nt, synthetic construct
  source 1..10: mol_type = other RNA
  misc_feature 1..10: note = Description of sequence: Splice site sequence
agagtacgcc

SEQ ID NO: 4809 - RNA, 10 nt, synthetic construct
  source 1..10: mol_type = other RNA
  misc_feature 1..10: note = Description of sequence: Splice site sequence
gatgtcttct

SEQ ID NO: 4810 - RNA, 10 nt, synthetic construct
  source 1..10: mol_type = other RNA
  misc_feature 1..10: note = Description of sequence: Splice site sequence
agggcaaggt

SEQ ID NO: 4811 - RNA, 10 nt, synthetic construct
  source 1..10: mol_type = other RNA
  misc_feature 1..10: note = Description of sequence: Splice site sequence
cgagtatgat

SEQ ID NO: 4812 - RNA, 10 nt, synthetic construct
  source 1..10: mol_type = other RNA
  misc_feature 1..10: note = Description of sequence: Splice site sequence
atggtagagt

SEQ ID NO: 4813 - RNA, 10 nt, synthetic construct
  source 1..10: mol_type = other RNA
  misc_feature 1..10: note = Description of sequence: Splice site sequence
caagtacgag

SEQ ID NO: 4814 - RNA, 10 nt, synthetic construct
  source 1..10: mol_type = other RNA
  misc_feature 1..10: note = Description of sequence: Splice site sequence
tcggtatgat

SEQ ID NO: 4815 - RNA, 10 nt, synthetic construct
  source 1..10: mol_type = other RNA
  misc_feature 1..10: note = Description of sequence: Splice site sequence
ccggtgtgtt

SEQ ID NO: 4816 - RNA, 10 nt, synthetic construct
  source 1..10: mol_type = other RNA
  misc_feature 1..10: note = Description of sequence: Splice site sequence
agggtctgtg

SEQ ID NO: 4817 - RNA, 10 nt, synthetic construct
  source 1..10: mol_type = other RNA
  misc_feature 1..10: note = Description of sequence: Splice site sequence
ggagtaggct

SEQ ID NO: 4818 - RNA, 10 nt, synthetic construct
  source 1..10: mol_type = other RNA
  misc_feature 1..10: note = Description of sequence: Splice site sequence
aaggtctatg

SEQ ID NO: 4819 - RNA, 10 nt, synthetic construct
  source 1..10: mol_type = other RNA
  misc_feature 1..10: note = Description of sequence: Splice site sequence
gcagtgcgtg

SEQ ID NO: 4820 - RNA, 10 nt, synthetic construct
  source 1..10: mol_type = other RNA
  misc_feature 1..10: note = Description of sequence: Splice site sequence
tgggtgagaa

SEQ ID NO: 4821 - RNA, 10 nt, synthetic construct
  source 1..10: mol_type = other RNA
  misc_feature 1..10: note = Description of sequence: Splice site sequence
agggtaaagt

SEQ ID NO: 4822 - RNA, 10 nt, synthetic construct
  source 1..10: mol_type = other RNA
  misc_feature 1..10: note = Description of sequence: Splice site sequence
gaggtaggac

SEQ ID NO: 4823 - RNA, 10 nt, synthetic construct
  source 1..10: mol_type = other RNA
  misc_feature 1..10: note = Description of sequence: Splice site sequence
ctagtaagca

SEQ ID NO: 4824 - RNA, 10 nt, synthetic construct
  source 1..10: mol_type = other RNA
  misc_feature 1..10: note = Description of sequence: Splice site sequence
ttagtaggct

SEQ ID NO: 4825 - RNA, 10 nt, synthetic construct
  source 1..10: mol_type = other RNA
  misc_feature 1..10: note = Description of sequence: Splice site sequence
ctggtgggat

SEQ ID NO: 4826 - RNA, 10 nt, synthetic construct
  source 1..10: mol_type = other RNA
  misc_feature 1..10: note = Description of sequence: Splice site sequence
ctggttagta

SEQ ID NO: 4827 - RNA, 10 nt, synthetic construct
  source 1..10: mol_type = other RNA
  misc_feature 1..10: note = Description of sequence: Splice site sequence
aaggtacgtg

SEQ ID NO: 4828 - RNA, 10 nt, synthetic construct
  source 1..10: mol_type = other RNA
  misc_feature 1..10: note = Description of sequence: Splice site sequence
cgggtgagat

SEQ ID NO: 4829 - RNA, 10 nt, synthetic construct
  source 1..10: mol_type = other RNA
  misc_feature 1..10: note = Description of sequence: Splice site sequence
aaggtgcatg

SEQ ID NO: 4830 - RNA, 10 nt, synthetic construct
  source 1..10: mol_type = other RNA
  misc_feature 1..10: note = Description of sequence: Splice site sequence
aatgtgggct

SEQ ID NO: 4831 - RNA, 10 nt, synthetic construct
  source 1..10: mol_type = other RNA
  misc_feature 1..10: note = Description of sequence: Splice site sequence
caggttgact

SEQ ID NO: 4832 - RNA, 10 nt, synthetic construct
  source 1..10: mol_type = other RNA
  misc_feature 1..10: note = Description of sequence: Splice site sequence
caggttacag

SEQ ID NO: 4833 - RNA, 10 nt, synthetic construct
  source 1..10: mol_type = other RNA
  misc_feature 1..10: note = Description of sequence: Splice site sequence
gcggtaacat

SEQ ID NO: 4834 - RNA, 10 nt, synthetic construct
  source 1..10: mol_type = other RNA
  misc_feature 1..10: note = Description of sequence: Splice site sequence
attgtcagtc

SEQ ID NO: 4835 - RNA, 10 nt, synthetic construct
  source 1..10: mol_type = other RNA
  misc_feature 1..10: note = Description of sequence: Splice site sequence
caagtataca

SEQ ID NO: 4836 - RNA, 10 nt, synthetic construct
  source 1..10: mol_type = other RNA
  misc_feature 1..10: note = Description of sequence: Splice site sequence
gatgtccgcc

SEQ ID NO: 4837 - RNA, 10 nt, synthetic construct
  source 1..10: mol_type = other RNA
  misc_feature 1..10: note = Description of sequence: Splice site sequence
aaggtgcgga

SEQ ID NO: 4838 - RNA, 10 nt, synthetic construct
  source 1..10: mol_type = other RNA
  misc_feature 1..10: note = Description of sequence: Splice site sequence
aacgtaagag

SEQ ID NO: 4839 - RNA, 10 nt, synthetic construct
  source 1..10: mol_type = other RNA
  misc_feature 1..10: note = Description of sequence: Splice site sequence
tgggttggta

SEQ ID NO: 4840 - RNA, 10 nt, synthetic construct
  source 1..10: mol_type = other RNA
  misc_feature 1..10: note = Description of sequence: Splice site sequence
caagtgtaag

SEQ ID NO: 4841 - RNA, 10 nt, synthetic construct
  source 1..10: mol_type = other RNA
  misc_feature 1..10: note = Description of sequence: Splice site sequence
gtggtaacgt

SEQ ID NO: 4842 - RNA, 10 nt, synthetic construct
  source 1..10: mol_type = other RNA
  misc_feature 1..10: note = Description of sequence: Splice site sequence
ctggtgatca

SEQ ID NO: 4843 - RNA, 10 nt, synthetic construct
  source 1..10: mol_type = other RNA
  misc_feature 1..10: note = Description of sequence: Splice site sequence
agggtggggc

SEQ ID NO: 4844 - RNA, 10 nt, synthetic construct
  source 1..10: mol_type = other RNA
  misc_feature 1..10: note = Description of sequence: Splice site sequence
tcggtaaaga

SEQ ID NO: 4845 - RNA, 10 nt, synthetic construct
  source 1..10: mol_type = other RNA
  misc_feature 1..10: note = Description of sequence: Splice site sequence
caggtacacc

SEQ ID NO: 4846 - RNA, 10 nt, synthetic construct
  source 1..10: mol_type = other RNA
  misc_feature 1..10: note = Description of sequence: Splice site sequence
cgggtaaggg

SEQ ID NO: 4847 - RNA, 10 nt, synthetic construct
  source 1..10: mol_type = other RNA
  misc_feature 1..10: note = Description of sequence: Splice site sequence
caagtttgct

SEQ ID NO: 4848 - RNA, 10 nt, synthetic construct
  source 1..10: mol_type = other RNA
  misc_feature 1..10: note = Description of sequence: Splice site sequence
acagtgcgtg

SEQ ID NO: 4849 - RNA, 10 nt, synthetic construct
  source 1..10: mol_type = other RNA
  misc_feature 1..10: note = Description of sequence: Splice site sequence
ttggtatggg

SEQ ID NO: 4850 - RNA, 10 nt, synthetic construct
  source 1..10: mol_type = other RNA
  misc_feature 1..10: note = Description of sequence: Splice site sequence
gaggctcatc

SEQ ID NO: 4851 - RNA, 10 nt, synthetic construct
  source 1..10: mol_type = other RNA
  misc_feature 1..10: note = Description of sequence: Splice site sequence
ctggtaatag

SEQ ID NO: 4852 - RNA, 10 nt, synthetic construct
  source 1..10: mol_type = other RNA
  misc_feature 1..10: note = Description of sequence: Splice site sequence
atggtggata

SEQ ID NO: 4853 - RNA, 10 nt, synthetic construct
  source 1..10: mol_type = other RNA
  misc_feature 1..10: note = Description of sequence: Splice site sequence
tcagtgaatt

SEQ ID NO: 4854 - RNA, 10 nt, synthetic construct
  source 1..10: mol_type = other RNA
  misc_feature 1..10: note = Description of sequence: Splice site sequence
aatgtaatta

SEQ ID NO: 4855 - RNA, 10 nt, synthetic construct
  source 1..10: mol_type = other RNA
  misc_feature 1..10: note = Description of sequence: Splice site sequence
gcagtctaaa

SEQ ID NO: 4856 - RNA, 10 nt, synthetic construct
  source 1..10: mol_type = other RNA
  misc_feature 1..10: note = Description of sequence: Splice site sequence
aaggtattct

SEQ ID NO: 4857 - RNA, 10 nt, synthetic construct
  source 1..10: mol_type = other RNA
  misc_feature 1..10: note = Description of sequence: Splice site sequence
gaggtcatca

SEQ ID NO: 4858 - RNA, 10 nt, synthetic construct
  source 1..10: mol_type = other RNA
  misc_feature 1..10: note = Description of sequence: Splice site sequence
tgggtccatg

SEQ ID NO: 4859 - RNA, 10 nt, synthetic construct
  source 1..10: mol_type = other RNA
  misc_feature 1..10: note = Description of sequence: Splice site sequence
agagtttgta

SEQ ID NO: 4860 - RNA, 10 nt, synthetic construct
  source 1..10: mol_type = other RNA
  misc_feature 1..10: note = Description of sequence: Splice site sequence
agggtagact

SEQ ID NO: 4861 - RNA, 10 nt, synthetic construct
  source 1..10: mol_type = other RNA
  misc_feature 1..10: note = Description of sequence: Splice site sequence
aaggtaggac

SEQ ID NO: 4862 - RNA, 10 nt, synthetic construct
  source 1..10: mol_type = other RNA
  misc_feature 1..10: note = Description of sequence: Splice site sequence
tgtgtgttga

SEQ ID NO: 4863 - RNA, 10 nt, synthetic construct
  source 1..10: mol_type = other RNA
  misc_feature 1..10: note = Description of sequence: Splice site sequence
tcagtacgtg

SEQ ID NO: 4864 - RNA, 10 nt, synthetic construct
  source 1..10: mol_type = other RNA
  misc_feature 1..10: note = Description of sequence: Splice site sequence
atggtctctc

SEQ ID NO: 4865 - RNA, 10 nt, synthetic construct
  source 1..10: mol_type = other RNA
  misc_feature 1..10: note = Description of sequence: Splice site sequence
tgagttagta

SEQ ID NO: 4866 - RNA, 10 nt, synthetic construct
  source 1..10: mol_type = other RNA
  misc_feature 1..10: note = Description of sequence: Splice site sequence
tgagtaaagt

SEQ ID NO: 4867 - RNA, 10 nt, synthetic construct
  source 1..10: mol_type = other RNA
  misc_feature 1..10: note = Description of sequence: Splice site sequence
gaggtgaccg

SEQ ID NO: 4868 - RNA, 10 nt, synthetic construct
  source 1..10: mol_type = other RNA
  misc_feature 1..10: note = Description of sequence: Splice site sequence
gaggtatatc

SEQ ID NO: 4869 - RNA, 10 nt, synthetic construct
  source 1..10: mol_type = other RNA
  misc_feature 1..10: note = Description of sequence: Splice site sequence
caggtgccat

SEQ ID NO: 4870 - RNA, 10 nt, synthetic construct
  source 1..10: mol_type = other RNA
  misc_feature 1..10: note = Description of sequence: Splice site sequence
agagtggtga

SEQ ID NO: 4871 - RNA, 10 nt, synthetic construct
  source 1..10: mol_type = other RNA
  misc_feature 1..10: note = Description of sequence: Splice site sequence
gttgtaagaa

SEQ ID NO: 4872 - RNA, 10 nt, synthetic construct
  source 1..10: mol_type = other RNA
  misc_feature 1..10: note = Description of sequence: Splice site sequence
agagtaaata

SEQ ID NO: 4873 - RNA, 10 nt, synthetic construct
  source 1..10: mol_type = other RNA
  misc_feature 1..10: note = Description of sequence: Splice site sequence
agggtgaagg

SEQ ID NO: 4874 - RNA, 10 nt, synthetic construct
  source 1..10: mol_type = other RNA
  misc_feature 1..10: note = Description of sequence: Splice site sequence
ctggtagatt

SEQ ID NO: 4875 - RNA, 10 nt, synthetic construct
  source 1..10: mol_type = other RNA
  misc_feature 1..10: note = Description of sequence: Splice site sequence
gaggttcagg

SEQ ID NO: 4876 - RNA, 10 nt, synthetic construct
  source 1..10: mol_type = other RNA
  misc_feature 1..10: note = Description of sequence: Splice site sequence
agggtcttca

SEQ ID NO: 4877 - RNA, 10 nt, synthetic construct
  source 1..10: mol_type = other RNA
  misc_feature 1..10: note = Description of sequence: Splice site sequence
ctggtaacct

SEQ ID NO: 4878 - RNA, 10 nt, synthetic construct
  source 1..10: mol_type = other RNA
  misc_feature 1..10: note = Description of sequence: Splice site sequence
acagtactga

SEQ ID NO: 4879 - RNA, 10 nt, synthetic construct
  source 1..10: mol_type = other RNA
  misc_feature 1..10: note = Description of sequence: Splice site sequence
agagtgggtc

SEQ ID NO: 4880 - RNA, 10 nt, synthetic construct
  source 1..10: mol_type = other RNA
  misc_feature 1..10: note = Description of sequence: Splice site sequence
atggtatgag

SEQ ID NO: 4881 - RNA, 10 nt, synthetic construct
  source 1..10: mol_type = other RNA
  misc_feature 1..10: note = Description of sequence: Splice site sequence
aaggttatat

SEQ ID NO: 4882 - RNA, 10 nt, synthetic construct
  source 1..10: mol_type = other RNA
  misc_feature 1..10: note = Description of sequence: Splice site sequence
agagtatagt

SEQ ID NO: 4883 - RNA, 10 nt, synthetic construct
  source 1..10: mol_type = other RNA
  misc_feature 1..10: note = Description of sequence: Splice site sequence
aaagtatgaa

SEQ ID NO: 4884 - RNA, 10 nt, synthetic construct
  source 1..10: mol_type = other RNA
  misc_feature 1..10: note = Description of sequence: Splice site sequence
taggtggcta

SEQ ID NO: 4885 - RNA, 10 nt, synthetic construct
  source 1..10: mol_type = other RNA
  misc_feature 1..10: note = Description of sequence: Splice site sequence
accgtatggg

SEQ ID NO: 4886 - RNA, 10 nt, synthetic construct
  source 1..10: mol_type = other RNA
  misc_feature 1..10: note = Description of sequence: Splice site sequence
aaagtataat

SEQ ID NO: 4887 - RNA, 10 nt, synthetic construct
  source 1..10: mol_type = other RNA
  misc_feature 1..10: note = Description of sequence: Splice site sequence
tttgtatggc

SEQ ID NO: 4888 - RNA, 10 nt, synthetic construct
  source 1..10: mol_type = other RNA
  misc_feature 1..10: note = Description of sequence: Splice site sequence
ggggtcgcgt

SEQ ID NO: 4889 - RNA, 10 nt, synthetic construct
  source 1..10: mol_type = other RNA
  misc_feature 1..10: note = Description of sequence: Splice site sequence
gtggtggttt

SEQ ID NO: 4890 - RNA, 10 nt, synthetic construct
  source 1..10: mol_type = other RNA
  misc_feature 1..10: note = Description of sequence: Splice site sequence
caggtttgac

SEQ ID NO: 4891 - RNA, 10 nt, synthetic construct
  source 1..10: mol_type = other RNA
  misc_feature 1..10: note = Description of sequence: Splice site sequence
ggagtaggcg

SEQ ID NO: 4892 - RNA, 10 nt, synthetic construct
  source 1..10: mol_type = other RNA
  misc_feature 1..10: note = Description of sequence: Splice site sequence
gaggtaccct

SEQ ID NO: 4893 - RNA, 10 nt, synthetic construct
  source 1..10: mol_type = other RNA
  misc_feature 1..10: note = Description of sequence: Splice site sequence
atggtgtgca

SEQ ID NO: 4894 - RNA, 10 nt, synthetic construct
  source 1..10: mol_type = other RNA
  misc_feature 1..10: note = Description of sequence: Splice site sequence
gtggttggtg

SEQ ID NO: 4895 - RNA, 10 nt, synthetic construct
  source 1..10: mol_type = other RNA
  misc_feature 1..10: note = Description of sequence: Splice site sequence
aaagtatgct

SEQ ID NO: 4896 - RNA, 10 nt, synthetic construct
  source 1..10: mol_type = other RNA
  misc_feature 1..10: note = Description of sequence: Splice site sequence
taagttacat

SEQ ID NO: 4897 - RNA, 10 nt, synthetic construct
  source 1..10: mol_type = other RNA
  misc_feature 1..10: note = Description of sequence: Splice site sequence
acagtatgag

SEQ ID NO: 4898 - RNA, 10 nt, synthetic construct
  source 1..10: mol_type = other RNA
  misc_feature 1..10: note = Description of sequence: Splice site sequence
ggagtatgtt

SEQ ID NO: 4899 - RNA, 10 nt, synthetic construct
  source 1..10: mol_type = other RNA
  misc_feature 1..10: note = Description of sequence: Splice site sequence
tttgtgagaa

SEQ ID NO: 4900 - RNA, 10 nt, synthetic construct
  source 1..10: mol_type = other RNA
  misc_feature 1..10: note = Description of sequence: Splice site sequence
aatgtgcgtt

SEQ ID NO: 4901 - RNA, 10 nt, synthetic construct
  source 1..10: mol_type = other RNA
  misc_feature 1..10: note = Description of sequence: Splice site sequence
caggtagagt

SEQ ID NO: 4902 - RNA, 10 nt, synthetic construct
  source 1..10: mol_type = other RNA
  misc_feature 1..10: note = Description of sequence: Splice site sequence
atggtgttaa

SEQ ID NO: 4903 - RNA, 10 nt, synthetic construct
  source 1..10: mol_type = other RNA
  misc_feature 1..10: note = Description of sequence: Splice site sequence
catgtgcgtc

SEQ ID NO: 4904 - RNA, 10 nt, synthetic construct
  source 1..10: mol_type = other RNA
  misc_feature 1..10: note = Description of sequence: Splice site sequence
atagttggat

SEQ ID NO: 4905 - RNA, 10 nt, synthetic construct
  source 1..10: mol_type = other RNA
  misc_feature 1..10: note = Description of sequence: Splice site sequence
gaggtacgta

SEQ ID NO: 4906 - RNA, 10 nt, synthetic construct
  source 1..10: mol_type = other RNA
  misc_feature 1..10: note = Description of sequence: Splice site sequence
gttgtgagaa

SEQ ID NO: 4907 - RNA, 10 nt, synthetic construct
  source 1..10: mol_type = other RNA
  misc_feature 1..10: note = Description of sequence: Splice site sequence
caagtacatc

SEQ ID NO: 4908 - RNA, 10 nt, synthetic construct
  source 1..10: mol_type = other RNA
  misc_feature 1..10: note = Description of sequence: Splice site sequence
gaggtagttt

SEQ ID NO: 4909 - RNA, 10 nt, synthetic construct
  source 1..10: mol_type = other RNA
  misc_feature 1..10: note = Description of sequence: Splice site sequence
actgtacaga

SEQ ID NO: 4910 - RNA, 10 nt, synthetic construct
  source 1..10: mol_type = other RNA
  misc_feature 1..10: note = Description of sequence: Splice site sequence
ccggttgtga

SEQ ID NO: 4911 - RNA, 10 nt, synthetic construct
  source 1..10: mol_type = other RNA
  misc_feature 1..10: note = Description of sequence: Splice site sequence
tgggtcagtg

SEQ ID NO: 4912 - RNA, 10 nt, synthetic construct
  source 1..10: mol_type = other RNA
  misc_feature 1..10: note = Description of sequence: Splice site sequence
gtagtaagaa

SEQ ID NO: 4913 - RNA, 10 nt, synthetic construct
  source 1..10: mol_type = other RNA
  misc_feature 1..10: note = Description of sequence: Splice site sequence
gacgtacttt

SEQ ID NO: 4914 - RNA, 10 nt, synthetic construct
  source 1..10: mol_type = other RNA
  misc_feature 1..10: note = Description of sequence: Splice site sequence
agagtcagtc

SEQ ID NO: 4915 - RNA, 10 nt, synthetic construct
  source 1..10: mol_type = other RNA
  misc_feature 1..10: note = Description of sequence: Splice site sequence
taggttagtt

SEQ ID NO: 4916 - RNA, 10 nt, synthetic construct
  source 1..10: mol_type = other RNA
  misc_feature 1..10: note = Description of sequence: Splice site sequence
agggcagcag

SEQ ID NO: 4917 - RNA, 10 nt, synthetic construct
  source 1..10: mol_type = other RNA
  misc_feature 1..10: note = Description of sequence: Splice site sequence
aaggtcctac

SEQ ID NO: 4918 - RNA, 10 nt, synthetic construct
  source 1..10: mol_type = other RNA
  misc_feature 1..10: note = Description of sequence: Splice site sequence
aatgtaattg

SEQ ID NO: 4919 - RNA, 10 nt, synthetic construct
  source 1..10: mol_type = other RNA
  misc_feature 1..10: note = Description of sequence: Splice site sequence
caggtgcggg

SEQ ID NO: 4920 - RNA, 10 nt, synthetic construct
  source 1..10: mol_type = other RNA
  misc_feature 1..10: note = Description of sequence: Splice site sequence
ctggtaatgg

SEQ ID NO: 4921 - RNA, 10 nt, synthetic construct
  source 1..10: mol_type = other RNA
  misc_feature 1..10: note = Description of sequence: Splice site sequence
caagtagccc

SEQ ID NO: 4922 - RNA, 10 nt, synthetic construct
  source 1..10: mol_type = other RNA
  misc_feature 1..10: note = Description of sequence: Splice site sequence
gaagtcagtt

SEQ ID NO: 4923 - RNA, 10 nt, synthetic construct
  source 1..10: mol_type = other RNA
  misc_feature 1..10: note = Description of sequence: Splice site sequence
acagtaattg

SEQ ID NO: 4924 - RNA, 10 nt, synthetic construct
  source 1..10: mol_type = other RNA
  misc_feature 1..10: note = Description of sequence: Splice site sequence
ttagttagta

SEQ ID NO: 4925 - RNA, 10 nt, synthetic construct
  source 1..10: mol_type = other RNA
  misc_feature 1..10: note = Description of sequence: Splice site sequence
cctgtatttt

SEQ ID NO: 4926 - RNA, 10 nt, synthetic construct
  source 1..10: mol_type = other RNA
  misc_feature 1..10: note = Description of sequence: Splice site sequence
atcgtaagaa

SEQ ID NO: 4927 - RNA, 10 nt, synthetic construct
  source 1..10: mol_type = other RNA
  misc_feature 1..10: note = Description of sequence: Splice site sequence
ccagtgagca

SEQ ID NO: 4928 - RNA, 10 nt, synthetic construct
  source 1..10: mol_type = other RNA
  misc_feature 1..10: note = Description of sequence: Splice site sequence
gaagtaaggc

SEQ ID NO: 4929 - RNA, 10 nt, synthetic construct
  source 1..10: mol_type = other RNA
  misc_feature 1..10: note = Description of sequence: Splice site sequence
tgagtgggta

SEQ ID NO: 4930 - RNA, 10 nt, synthetic construct
  source 1..10: mol_type = other RNA
  misc_feature 1..10: note = Description of sequence: Splice site sequence
tcagtggtag

SEQ ID NO: 4931 - RNA, 10 nt, synthetic construct
  source 1..10: mol_type = other RNA
  misc_feature 1..10: note = Description of sequence: Splice site sequence
tctgtacagg

SEQ ID NO: 4932 - RNA, 10 nt, synthetic construct
  source 1..10: mol_type = other RNA
  misc_feature 1..10: note = Description of sequence: Splice site sequence
cgagtgagtg

SEQ ID NO: 4933 - RNA, 10 nt, synthetic construct
  source 1..10: mol_type = other RNA
  misc_feature 1..10: note = Description of sequence: Splice site sequence
tccgtatgtg

SEQ ID NO: 4934 - RNA, 10 nt, synthetic construct
  source 1..10: mol_type = other RNA
  misc_feature 1..10: note = Description of sequence: Splice site sequence
catgccgttt

SEQ ID NO: 4935 - RNA, 10 nt, synthetic construct
  source 1..10: mol_type = other RNA
  misc_feature 1..10: note = Description of sequence: Splice site sequence
aaagtgactt

SEQ ID NO: 4936 - RNA, 10 nt, synthetic construct
  source 1..10: mol_type = other RNA
  misc_feature 1..10: note = Description of sequence: Splice site sequence
agagtaggca

SEQ ID NO: 4937 - RNA, 10 nt, synthetic construct
  source 1..10: mol_type = other RNA
  misc_feature 1..10: note = Description of sequence: Splice site sequence
gaagtaagag

SEQ ID NO: 4938 - RNA, 10 nt, synthetic construct
  source 1..10: mol_type = other RNA
  misc_feature 1..10: note = Description of sequence: Splice site sequence
caggcaggtt

SEQ ID NO: 4939 - RNA, 10 nt, synthetic construct
  source 1..10: mol_type = other RNA
  misc_feature 1..10: note = Description of sequence: Splice site sequence
ttggtagagc

SEQ ID NO: 4940 - RNA, 10 nt, synthetic construct
  source 1..10: mol_type = other RNA
  misc_feature 1..10: note = Description of sequence: Splice site sequence
aaggtggaaa

SEQ ID NO: 4941 - RNA, 10 nt, synthetic construct
  source 1..10: mol_type = other RNA
  misc_feature 1..10: note = Description of sequence: Splice site sequence
gaggcaggtc

SEQ ID NO: 4942 - RNA, 10 nt, synthetic construct
  source 1..10: mol_type = other RNA
  misc_feature 1..10: note = Description of sequence: Splice site sequence
atggtacgac

SEQ ID NO: 4943 - RNA, 10 nt, synthetic construct
  source 1..10: mol_type = other RNA
  misc_feature 1..10: note = Description of sequence: Splice site sequence
agggtaggaa

SEQ ID NO: 4944 - RNA, 10 nt, synthetic construct
  source 1..10: mol_type = other RNA
  misc_feature 1..10: note = Description of sequence: Splice site sequence
agggtaggta

SEQ ID NO: 4945 - RNA, 10 nt, synthetic construct
  source 1..10: mol_type = other RNA
  misc_feature 1..10: note = Description of sequence: Splice site sequence
ttggtaaggt

SEQ ID NO: 4946 - RNA, 10 nt, synthetic construct
  source 1..10: mol_type = other RNA
  misc_feature 1..10: note = Description of sequence: Splice site sequence
atggtacaga

SEQ ID NO: 4947 - RNA, 10 nt, synthetic construct
  source 1..10: mol_type = other RNA
  misc_feature 1..10: note = Description of sequence: Splice site sequence
caggtagagc

SEQ ID NO: 4948 - RNA, 10 nt, synthetic construct
  source 1..10: mol_type = other RNA
  misc_feature 1..10: note = Description of sequence: Splice site sequence
taggtaaggt

SEQ ID NO: 4949 - RNA, 10 nt, synthetic construct
  source 1..10: mol_type = other RNA
  misc_feature 1..10: note = Description of sequence: Splice site sequence
ggggttagag

SEQ ID NO: 4950 - RNA, 10 nt, synthetic construct
  source 1..10: mol_type = other RNA
  misc_feature 1..10: note = Description of sequence: Splice site sequence
aaggtatcaa

SEQ ID NO: 4951 - RNA, 10 nt, synthetic construct
  source 1..10: mol_type = other RNA
  misc_feature 1..10: note = Description of sequence: Splice site sequence
gaggtagccc

SEQ ID NO: 4952 - RNA, 10 nt, synthetic construct
  source 1..10: mol_type = other RNA
  misc_feature 1..10: note = Description of sequence: Splice site sequence
caggtgcctc

SEQ ID NO: 4953 - RNA, 10 nt, synthetic construct
  source 1..10: mol_type = other RNA
  misc_feature 1..10: note = Description of sequence: Splice site sequence
gcagtaagag

SEQ ID NO: 4954 - RNA, 10 nt, synthetic construct
  source 1..10: mol_type = other RNA
  misc_feature 1..10: note = Description of sequence: Splice site sequence
acggtagagt

SEQ ID NO: 4955 - RNA, 10 nt, synthetic construct
  source 1..10: mol_type = other RNA
  misc_feature 1..10: note = Description of sequence: Splice site sequence
tgggtaatgg

SEQ ID NO: 4956 - RNA, 10 nt, synthetic construct
  source 1..10: mol_type = other RNA
  misc_feature 1..10: note = Description of sequence: Splice site sequence
ctggtcagtt

SEQ ID NO: 4957 - RNA, 10 nt, synthetic construct
  source 1..10: mol_type = other RNA
  misc_feature 1..10: note = Description of sequence: Splice site sequence
gtggtacatt

SEQ ID NO: 4958 - RNA, 10 nt, synthetic construct
  source 1..10: mol_type = other RNA
  misc_feature 1..10: note = Description of sequence: Splice site sequence
aaagtaggtt

SEQ ID NO: 4959 - RNA, 10 nt, synthetic construct
  source 1..10: mol_type = other RNA
  misc_feature 1..10: note = Description of sequence: Splice site sequence
aaggccaaga

SEQ ID NO: 4960 - RNA, 10 nt, synthetic construct
  source 1..10: mol_type = other RNA
  misc_feature 1..10: note = Description of sequence: Splice site sequence
cgggtgggca

SEQ ID NO: 4961 - RNA, 10 nt, synthetic construct
  source 1..10: mol_type = other RNA
  misc_feature 1..10: note = Description of sequence: Splice site sequence
acggtccggg

SEQ ID NO: 4962 - RNA, 10 nt, synthetic construct
  source 1..10: mol_type = other RNA
  misc_feature 1..10: note = Description of sequence: Splice site sequence
cgagtatgag

SEQ ID NO: 4963 - RNA, 10 nt, synthetic construct
  source 1..10: mol_type = other RNA
  misc_feature 1..10: note = Description of sequence: Splice site sequence
ctggtatgcc

SEQ ID NO: 4964 - RNA, 10 nt, synthetic construct
  source 1..10: mol_type = other RNA
  misc_feature 1..10: note = Description of sequence: Splice site sequence
gaggtggatg

SEQ ID NO: 4965 - RNA, 10 nt, synthetic construct
  source 1..10: mol_type = other RNA
  misc_feature 1..10: note = Description of sequence: Splice site sequence
caggcctttc

SEQ ID NO: 4966 - RNA, 10 nt, synthetic construct
  source 1..10: mol_type = other RNA
  misc_feature 1..10: note = Description of sequence: Splice site sequence
aaagtacatc

SEQ ID NO: 4967 - RNA, 10 nt, synthetic construct
  source 1..10: mol_type = other RNA
  misc_feature 1..10: note = Description of sequence: Splice site sequence
aaagtaatca

SEQ ID NO: 4968 - RNA, 10 nt, synthetic construct
  source 1..10: mol_type = other RNA
  misc_feature 1..10: note = Description of sequence: Splice site sequence
gaggtaactg

SEQ ID NO: 4969 - RNA, 10 nt, synthetic construct
  source 1..10: mol_type = other RNA
  misc_feature 1..10: note = Description of sequence: Splice site sequence
ctggtaaaga

SEQ ID NO: 4970 - RNA, 10 nt, synthetic construct
  source 1..10: mol_type = other RNA
  misc_feature 1..10: note = Description of sequence: Splice site sequence
cgtgtaagca

SEQ ID NO: 4971 - RNA, 10 nt, synthetic construct
  source 1..10: mol_type = other RNA
  misc_feature 1..10: note = Description of sequence: Splice site sequence
tgggcaagta

SEQ ID NO: 4972 - RNA, 10 nt, synthetic construct
  source 1..10: mol_type = other RNA
  misc_feature 1..10: note = Description of sequence: Splice site sequence
gcggtggcga

SEQ ID NO: 4973 - RNA, 10 nt, synthetic construct
  source 1..10: mol_type = other RNA
  misc_feature 1..10: note = Description of sequence: Splice site sequence
gaggtggccg

SEQ ID NO: 4974 - RNA, 10 nt, synthetic construct
  source 1..10: mol_type = other RNA
  misc_feature 1..10: note = Description of sequence: Splice site sequence
attgcatgca

SEQ ID NO: 4975 - RNA, 10 nt, synthetic construct
  source 1..10: mol_type = other RNA
  misc_feature 1..10: note = Description of sequence: Splice site sequence
acggtgactg

SEQ ID NO: 4976 - RNA, 10 nt, synthetic construct
  source 1..10: mol_type = other RNA
  misc_feature 1..10: note = Description of sequence: Splice site sequence
caggtcagat

SEQ ID NO: 4977 - RNA, 10 nt, synthetic construct
  source 1..10: mol_type = other RNA
  misc_feature 1..10: note = Description of sequence: Splice site sequence
agagtaactc

SEQ ID NO: 4978 - RNA, 10 nt, synthetic construct
  source 1..10: mol_type = other RNA
  misc_feature 1..10: note = Description of sequence: Splice site sequence
tgagtaacag

SEQ ID NO: 4979 - RNA, 10 nt, synthetic construct
  source 1..10: mol_type = other RNA
  misc_feature 1..10: note = Description of sequence: Splice site sequence
aaggtacccg

SEQ ID NO: 4980 - RNA, 10 nt, synthetic construct
  source 1..10: mol_type = other RNA
  misc_feature 1..10: note = Description of sequence: Splice site sequence
agggtaggct

SEQ ID NO: 4981 - RNA, 10 nt, synthetic construct
  source 1..10: mol_type = other RNA
  misc_feature 1..10: note = Description of sequence: Splice site sequence
ggggcaggac

SEQ ID NO: 4982 - RNA, 10 nt, synthetic construct
  source 1..10: mol_type = other RNA
  misc_feature 1..10: note = Description of sequence: Splice site sequence
cctgtaagtg

SEQ ID NO: 4983 - RNA, 10 nt, synthetic construct
  source 1..10: mol_type = other RNA
  misc_feature 1..10: note = Description of sequence: Splice site sequence
attgtaagtg

SEQ ID NO: 4984 - RNA, 10 nt, synthetic construct
  source 1..10: mol_type = other RNA
  misc_feature 1..10: note = Description of sequence: Splice site sequence
actgtacgag

SEQ ID NO: 4985 - RNA, 10 nt, synthetic construct
  source 1..10: mol_type = other RNA
  misc_feature 1..10: note = Description of sequence: Splice site sequence
gtagtagtgt

SEQ ID NO: 4986 - RNA, 10 nt, synthetic construct
  source 1..10: mol_type = other RNA
  misc_feature 1..10: note = Description of sequence: Splice site sequence
agagtatgag

SEQ ID NO: 4987 - RNA, 10 nt, synthetic construct
  source 1..10: mol_type = other RNA
  misc_feature 1..10: note = Description of sequence: Splice site sequence
tcagtgtggg

SEQ ID NO: 4988 - RNA, 10 nt, synthetic construct
  source 1..10: mol_type = other RNA
  misc_feature 1..10: note = Description of sequence: Splice site sequence
tgggtatata

SEQ ID NO: 4989 - RNA, 10 nt, synthetic construct
  source 1..10: mol_type = other RNA
  misc_feature 1..10: note = Description of sequence: Splice site sequence
taggtagcta

SEQ ID NO: 4990 - RNA, 10 nt, synthetic construct
  source 1..10: mol_type = other RNA
  misc_feature 1..10: note = Description of sequence: Splice site sequence
ggggtaaaga

SEQ ID NO: 4991 - RNA, 10 nt, synthetic construct
  source 1..10: mol_type = other RNA
  misc_feature 1..10: note = Description of sequence: Splice site sequence
agggttactt

SEQ ID NO: 4992 - RNA, 10 nt, synthetic construct
  source 1..10: mol_type = other RNA
  misc_feature 1..10: note = Description of sequence: Splice site sequence
catgtaaatg

SEQ ID NO: 4993 - RNA, 10 nt, synthetic construct
  source 1..10: mol_type = other RNA
  misc_feature 1..10: note = Description of sequence: Splice site sequence
ggagtagtaa

SEQ ID NO: 4994 - RNA, 10 nt, synthetic construct
  source 1..10: mol_type = other RNA
  misc_feature 1..10: note = Description of sequence: Splice site sequence
caggtcaatc

SEQ ID NO: 4995 - RNA, 10 nt, synthetic construct
  source 1..10: mol_type = other RNA
  misc_feature 1..10: note = Description of sequence: Splice site sequence
cgggttagtg

SEQ ID NO: 4996 - RNA, 10 nt, synthetic construct
  source 1..10: mol_type = other RNA
  misc_feature 1..10: note = Description of sequence: Splice site sequence
taggtacatg

SEQ ID NO: 4997 - RNA, 10 nt, synthetic construct
  source 1..10: mol_type = other RNA
  misc_feature 1..10: note = Description of sequence: Splice site sequence
taggttaaga

SEQ ID NO: 4998 - RNA, 10 nt, synthetic construct
  source 1..10: mol_type = other RNA
  misc_feature 1..10: note = Description of sequence: Splice site sequence
tgggtacctt

SEQ ID NO: 4999 - RNA, 10 nt, synthetic construct
  source 1..10: mol_type = other RNA
  misc_feature 1..10: note = Description of sequence: Splice site sequence
cgggtggaca

SEQ ID NO: 5000 - RNA, 10 nt, synthetic construct
  source 1..10: mol_type = other RNA
  misc_feature 1..10: note = Description of sequence: Splice site sequence
caggtcttac

SEQ ID NO: 5001 - RNA, 10 nt, synthetic construct
  source 1..10: mol_type = other RNA
  misc_feature 1..10: note = Description of sequence: Splice site sequence
aaggtggagc

SEQ ID NO: 5002 - RNA, 10 nt, synthetic construct
  source 1..10: mol_type = other RNA
  misc_feature 1..10: note = Description of sequence: Splice site sequence
atggtaacca

SEQ ID NO: 5003 - RNA, 10 nt, synthetic construct
  source 1..10: mol_type = other RNA
  misc_feature 1..10: note = Description of sequence: Splice site sequence
tcggtaagtt

SEQ ID NO: 5004 - RNA, 10 nt, synthetic construct
  source 1..10: mol_type = other RNA
  misc_feature 1..10: note = Description of sequence: Splice site sequence
tatgtacaaa

SEQ ID NO: 5005 - RNA, 10 nt, synthetic construct
  source 1..10: mol_type = other RNA
  misc_feature 1..10: note = Description of sequence: Splice site sequence
aatgtagatt

SEQ ID NO: 5006 - RNA, 10 nt, synthetic construct
  source 1..10: mol_type = other RNA
  misc_feature 1..10: note = Description of sequence: Splice site sequence
gtagctagta

SEQ ID NO: 5007 - RNA, 10 nt, synthetic construct
  source 1..10: mol_type = other RNA
  misc_feature 1..10: note = Description of sequence: Splice site sequence
aaggtattgg

SEQ ID NO: 5008 - RNA, 10 nt, synthetic construct
  source 1..10: mol_type = other RNA
  misc_feature 1..10: note = Description of sequence: Splice site sequence
gaggtctttg

SEQ ID NO: 5009 - RNA, 10 nt, synthetic construct
  source 1..10: mol_type = other RNA
  misc_feature 1..10: note = Description of sequence: Splice site sequence
gaagttcagg

SEQ ID NO: 5010 - RNA, 10 nt, synthetic construct
  source 1..10: mol_type = other RNA
  misc_feature 1..10: note = Description of sequence: Splice site sequence
tgggtatcac

SEQ ID NO: 5011 - RNA, 10 nt, synthetic construct
  source 1..10: mol_type = other RNA
  misc_feature 1..10: note = Description of sequence: Splice site sequence
agagtactgg

SEQ ID NO: 5012 - RNA, 10 nt, synthetic construct
  source 1..10: mol_type = other RNA
  misc_feature 1..10: note = Description of sequence: Splice site sequence
caggttaatg

SEQ ID NO: 5013 - RNA, 10 nt, synthetic construct
  source 1..10: mol_type = other RNA
  misc_feature 1..10: note = Description of sequence: Splice site sequence
agggtacgtg

SEQ ID NO: 5014 - RNA, 10 nt, synthetic construct
  source 1..10: mol_type = other RNA
  misc_feature 1..10: note = Description of sequence: Splice site sequence
agggcacagg

SEQ ID NO: 5015 - RNA, 10 nt, synthetic construct
  source 1..10: mol_type = other RNA
  misc_feature 1..10: note = Description of sequence: Splice site sequence
ctggttagtt

SEQ ID NO: 5016 - RNA, 10 nt, synthetic construct
  source 1..10: mol_type = other RNA
  misc_feature 1..10: note = Description of sequence: Splice site sequence
ttggtacgag

SEQ ID NO: 5017 - RNA, 10 nt, synthetic construct
  source 1..10: mol_type = other RNA
  misc_feature 1..10: note = Description of sequence: Splice site sequence
acggtgatca

SEQ ID NO: 5018 - RNA, 10 nt, synthetic construct
  source 1..10: mol_type = other RNA
  misc_feature 1..10: note = Description of sequence: Splice site sequence
cctgtgagag

SEQ ID NO: 5019 - RNA, 10 nt, synthetic construct
  source 1..10: mol_type = other RNA
  misc_feature 1..10: note = Description of sequence: Splice site sequence
gaggtgaagt

SEQ ID NO: 5020 - RNA, 10 nt, synthetic construct
  source 1..10: mol_type = other RNA
  misc_feature 1..10: note = Description of sequence: Splice site sequence
aaggtacatc

SEQ ID NO: 5021 - RNA, 10 nt, synthetic construct
  source 1..10: mol_type = other RNA
  misc_feature 1..10: note = Description of sequence: Splice site sequence
tctgtatgtg

SEQ ID NO: 5022 - RNA, 10 nt, synthetic construct
  source 1..10: mol_type = other RNA
  misc_feature 1..10: note = Description of sequence: Splice site sequence
ttggtggaag

SEQ ID NO: 5023 - RNA, 10 nt, synthetic construct
  source 1..10: mol_type = other RNA
  misc_feature 1..10: note = Description of sequence: Splice site sequence
tgggcaggtt

SEQ ID NO: 5024 - RNA, 10 nt, synthetic construct
  source 1..10: mol_type = other RNA
  misc_feature 1..10: note = Description of sequence: Splice site sequence
gaagtggagc

SEQ ID NO: 5025 - RNA, 10 nt, synthetic construct
  source 1..10: mol_type = other RNA
  misc_feature 1..10: note = Description of sequence: Splice site sequence
acagtaagac

SEQ ID NO: 5026 - RNA, 10 nt, synthetic construct
  source 1..10: mol_type = other RNA
  misc_feature 1..10: note = Description of sequence: Splice site sequence
cgggtaccaa

SEQ ID NO: 5027 - RNA, 10 nt, synthetic construct
  source 1..10: mol_type = other RNA
  misc_feature 1..10: note = Description of sequence: Splice site sequence
caagtacgtc

SEQ ID NO: 5028 - RNA, 10 nt, synthetic construct
  source 1..10: mol_type = other RNA
  misc_feature 1..10: note = Description of sequence: Splice site sequence
agagtgaggg

SEQ ID NO: 5029 - RNA, 10 nt, synthetic construct
  source 1..10: mol_type = other RNA
  misc_feature 1..10: note = Description of sequence: Splice site sequence
cgggtaagaa

SEQ ID NO: 5030 - RNA, 10 nt, synthetic construct
  source 1..10: mol_type = other RNA
  misc_feature 1..10: note = Description of sequence: Splice site sequence
aatgtaggtg

SEQ ID NO: 5031 - RNA, 10 nt, synthetic construct
  source 1..10: mol_type = other RNA
  misc_feature 1..10: note = Description of sequence: Splice site sequence
atcgtgtgct

SEQ ID NO: 5032 - RNA, 10 nt, synthetic construct
  source 1..10: mol_type = other RNA
  misc_feature 1..10: note = Description of sequence: Splice site sequence
taggtcatgg

SEQ ID NO: 5033 - RNA, 10 nt, synthetic construct
  source 1..10: mol_type = other RNA
  misc_feature 1..10: note = Description of sequence: Splice site sequence
caggttttga

SEQ ID NO: 5034 - RNA, 10 nt, synthetic construct
  source 1..10: mol_type = other RNA
  misc_feature 1..10: note = Description of sequence: Splice site sequence
aaggcatgca

SEQ ID NO: 5035 - RNA, 10 nt, synthetic construct
  source 1..10: mol_type = other RNA
  misc_feature 1..10: note = Description of sequence: Splice site sequence
gaggtgctgc

SEQ ID NO: 5036 - RNA, 10 nt, synthetic construct
  source 1..10: mol_type = other RNA
  misc_feature 1..10: note = Description of sequence: Splice site sequence
aaggttaata

SEQ ID NO: 5037 - RNA, 10 nt, synthetic construct
  source 1..10: mol_type = other RNA
  misc_feature 1..10: note = Description of sequence: Splice site sequence
caggttcatc

SEQ ID NO: 5038 - RNA, 10 nt, synthetic construct
  source 1..10: mol_type = other RNA
  misc_feature 1..10: note = Description of sequence: Splice site sequence
gcggtaggtg

SEQ ID NO: 5039 - RNA, 10 nt, synthetic construct
  source 1..10: mol_type = other RNA
  misc_feature 1..10: note = Description of sequence: Splice site sequence
gacgtgagta

SEQ ID NO: 5040 - RNA, 10 nt, synthetic construct
  source 1..10: mol_type = other RNA
  misc_feature 1..10: note = Description of sequence: Splice site sequence
caggtctact

SEQ ID NO: 5041 - RNA, 10 nt, synthetic construct
  source 1..10: mol_type = other RNA
  misc_feature 1..10: note = Description of sequence: Splice site sequence
ttggtatgag

SEQ ID NO: 5042 - RNA, 10 nt, synthetic construct
  source 1..10: mol_type = other RNA
  misc_feature 1..10: note = Description of sequence: Splice site sequence
agcgtgggca

SEQ ID NO: 5043 - RNA, 10 nt, synthetic construct
  source 1..10: mol_type = other RNA
  misc_feature 1..10: note = Description of sequence: Splice site sequence
atggtaaggt

SEQ ID NO: 5044 - RNA, 10 nt, synthetic construct
  source 1..10: mol_type = other RNA
  misc_feature 1..10: note = Description of sequence: Splice site sequence
atggtacctc

SEQ ID NO: 5045 - RNA, 10 nt, synthetic construct
  source 1..10: mol_type = other RNA
  misc_feature 1..10: note = Description of sequence: Splice site sequence
ttggtatggt

SEQ ID NO: 5046 - RNA, 10 nt, synthetic construct
  source 1..10: mol_type = other RNA
  misc_feature 1..10: note = Description of sequence: Splice site sequence
tatgtatgaa

SEQ ID NO: 5047 - RNA, 10 nt, synthetic construct
  source 1..10: mol_type = other RNA
  misc_feature 1..10: note = Description of sequence: Splice site sequence
tgggtatggg

SEQ ID NO: 5048 - RNA, 10 nt, synthetic construct
  source 1..10: mol_type = other RNA
  misc_feature 1..10: note = Description of sequence: Splice site sequence
gatgtaaata

SEQ ID NO: 5049 - RNA, 10 nt, synthetic construct
  source 1..10: mol_type = other RNA
  misc_feature 1..10: note = Description of sequence: Splice site sequence
ccggtaagtt

SEQ ID NO: 5050 - RNA, 10 nt, synthetic construct
  source 1..10: mol_type = other RNA
  misc_feature 1..10: note = Description of sequence: Splice site sequence
gaggtctgaa

SEQ ID NO: 5051 - RNA, 10 nt, synthetic construct
  source 1..10: mol_type = other RNA
  misc_feature 1..10: note = Description of sequence: Splice site sequence
gaggtgcgag

SEQ ID NO: 5052 - RNA, 10 nt, synthetic construct
  source 1..10: mol_type = other RNA
  misc_feature 1..10: note = Description of sequence: Splice site sequence
ctggtcagcc

SEQ ID NO: 5053 - RNA, 10 nt, synthetic construct
  source 1..10: mol_type = other RNA
  misc_feature 1..10: note = Description of sequence: Splice site sequence
caggttttgt

SEQ ID NO: 5054 - RNA, 10 nt, synthetic construct
  source 1..10: mol_type = other RNA
  misc_feature 1..10: note = Description of sequence: Splice site sequence
cgggtggtgt

SEQ ID NO: 5055 - RNA, 10 nt, synthetic construct
  source 1..10: mol_type = other RNA
  misc_feature 1..10: note = Description of sequence: Splice site sequence
taagttagta

SEQ ID NO: 5056 - RNA, 10 nt, synthetic construct
  source 1..10: mol_type = other RNA
  misc_feature 1..10: note = Description of sequence: Splice site sequence
tttgtgtgtg

SEQ ID NO: 5057 - RNA, 10 nt, synthetic construct
  source 1..10: mol_type = other RNA
  misc_feature 1..10: note = Description of sequence: Splice site sequence
caggttaacc

SEQ ID NO: 5058 - RNA, 10 nt, synthetic construct
  source 1..10: mol_type = other RNA
  misc_feature 1..10: note = Description of sequence: Splice site sequence
ttggtacttt

SEQ ID NO: 5059 - RNA, 10 nt, synthetic construct
  source 1..10: mol_type = other RNA
  misc_feature 1..10: note = Description of sequence: Splice site sequence
gctgtaaggc

SEQ ID NO: 5060 - RNA, 10 nt, synthetic construct
  source 1..10: mol_type = other RNA
  misc_feature 1..10: note = Description of sequence: Splice site sequence
agggtggctg

SEQ ID NO: 5061 - RNA, 10 nt, synthetic construct
  source 1..10: mol_type = other RNA
  misc_feature 1..10: note = Description of sequence: Splice site sequence
gatgtaaaaa

SEQ ID NO: 5062 - RNA, 10 nt, synthetic construct
  source 1..10: mol_type = other RNA
  misc_feature 1..10: note = Description of sequence: Splice site sequence
aaggtcaaaa

SEQ ID NO: 5063 - RNA, 10 nt, synthetic construct
  source 1..10: mol_type = other RNA
  misc_feature 1..10: note = Description of sequence: Splice site sequence
caggtagcgc

SEQ ID NO: 5064 - RNA, 10 nt, synthetic construct
  source 1..10: mol_type = other RNA
  misc_feature 1..10: note = Description of sequence: Splice site sequence
caggtttggc

SEQ ID NO: 5065 - RNA, 10 nt, synthetic construct
  source 1..10: mol_type = other RNA
  misc_feature 1..10: note = Description of sequence: Splice site sequence
gaggtggttt

SEQ ID NO: 5066 - RNA, 10 nt, synthetic construct
  source 1..10: mol_type = other RNA
  misc_feature 1..10: note = Description of sequence: Splice site sequence
cgggtaaata

SEQ ID NO: 5067 - RNA, 10 nt, synthetic construct
  source 1..10: mol_type = other RNA
  misc_feature 1..10: note = Description of sequence: Splice site sequence
ctggttcggt

SEQ ID NO: 5068 - RNA, 10 nt, synthetic construct
  source 1..10: mol_type = other RNA
  misc_feature 1..10: note = Description of sequence: Splice site sequence
ggagtgagcc

SEQ ID NO: 5069 - RNA, 10 nt, synthetic construct
  source 1..10: mol_type = other RNA
  misc_feature 1..10: note = Description of sequence: Splice site sequence
aaggtgcgcg

SEQ ID NO: 5070 - RNA, 10 nt, synthetic construct
  source 1..10: mol_type = other RNA
  misc_feature 1..10: note = Description of sequence: Splice site sequence
gaagtacatc

SEQ ID NO: 5071 - RNA, 10 nt, synthetic construct
  source 1..10: mol_type = other RNA
  misc_feature 1..10: note = Description of sequence: Splice site sequence
agtgtctgta

SEQ ID NO: 5072 - RNA, 10 nt, synthetic construct
  source 1..10: mol_type = other RNA
  misc_feature 1..10: note = Description of sequence: Splice site sequence
cccgtgagct

SEQ ID NO: 5073 - RNA, 10 nt, synthetic construct
  source 1..10: mol_type = other RNA
  misc_feature 1..10: note = Description of sequence: Splice site sequence
gaggttcaca

SEQ ID NO: 5074 - RNA, 10 nt, synthetic construct
  source 1..10: mol_type = other RNA
  misc_feature 1..10: note = Description of sequence: Splice site sequence
ctagtgggta

SEQ ID NO: 5075 - RNA, 10 nt, synthetic construct
  source 1..10: mol_type = other RNA
  misc_feature 1..10: note = Description of sequence: Splice site sequence
gaggtaacta

SEQ ID NO: 5076 - RNA, 10 nt, synthetic construct
  source 1..10: mol_type = other RNA
  misc_feature 1..10: note = Description of sequence: Splice site sequence
tcggtatgtc

SEQ ID NO: 5077 - RNA, 10 nt, synthetic construct
  source 1..10: mol_type = other RNA
  misc_feature 1..10: note = Description of sequence: Splice site sequence
taagtatttg

SEQ ID NO: 5078 - RNA, 10 nt, synthetic construct
  source 1..10: mol_type = other RNA
  misc_feature 1..10: note = Description of sequence: Splice site sequence
caggtaagcg

SEQ ID NO: 5079 - RNA, 10 nt, synthetic construct
  source 1..10: mol_type = other RNA
  misc_feature 1..10: note = Description of sequence: Splice site sequence
gaggtggtaa

SEQ ID NO: 5080 - RNA, 10 nt, synthetic construct
  source 1..10: mol_type = other RNA
  misc_feature 1..10: note = Description of sequence: Splice site sequence
cgagtaagag

SEQ ID NO: 5081 - RNA, 10 nt, synthetic construct
  source 1..10: mol_type = other RNA
  misc_feature 1..10: note = Description of sequence: Splice site sequence
ccggtaagct

SEQ ID NO: 5082 - RNA, 10 nt, synthetic construct
  source 1..10: mol_type = other RNA
  misc_feature 1..10: note = Description of sequence: Splice site sequence
gaggtcttgt

SEQ ID NO: 5083 - RNA, 10 nt, synthetic construct
  source 1..10: mol_type = other RNA
  misc_feature 1..10: note = Description of sequence: Splice site sequence
aaggtgggtc

SEQ ID NO: 5084 - RNA, 10 nt, synthetic construct
  source 1..10: mol_type = other RNA
  misc_feature 1..10: note = Description of sequence: Splice site sequence
cacgtaagtg

SEQ ID NO: 5085 - RNA, 10 nt, synthetic construct
  source 1..10: mol_type = other RNA
  misc_feature 1..10: note = Description of sequence: Splice site sequence
agtgtaatga

SEQ ID NO: 5086 - RNA, 10 nt, synthetic construct
  source 1..10: mol_type = other RNA
  misc_feature 1..10: note = Description of sequence: Splice site sequence
aaagtgtgta

SEQ ID NO: 5087 - RNA, 10 nt, synthetic construct
  source 1..10: mol_type = other RNA
  misc_feature 1..10: note = Description of sequence: Splice site sequence
ggagtgccaa

SEQ ID NO: 5088 - RNA, 10 nt, synthetic construct
  source 1..10: mol_type = other RNA
  misc_feature 1..10: note = Description of sequence: Splice site sequence
cacgtgagtt

SEQ ID NO: 5089 - RNA, 10 nt, synthetic construct
  source 1..10: mol_type = other RNA
  misc_feature 1..10: note = Description of sequence: Splice site sequence
aaggttggat

SEQ ID NO: 5090 - RNA, 10 nt, synthetic construct
  source 1..10: mol_type = other RNA
  misc_feature 1..10: note = Description of sequence: Splice site sequence
tatgtaaata

SEQ ID NO: 5091 - RNA, 10 nt, synthetic construct
  source 1..10: mol_type = other RNA
  misc_feature 1..10: note = Description of sequence: Splice site sequence
ctggtaggaa

SEQ ID NO: 5092 - RNA, 10 nt, synthetic construct
  source 1..10: mol_type = other RNA
  misc_feature 1..10: note = Description of sequence: Splice site sequence
tatgtaaact

SEQ ID NO: 5093 - RNA, 10 nt, synthetic construct
  source 1..10: mol_type = other RNA
  misc_feature 1..10: note = Description of sequence: Splice site sequence
aatgtatttt

SEQ ID NO: 5094 - RNA, 10 nt, synthetic construct
  source 1..10: mol_type = other RNA
  misc_feature 1..10: note = Description of sequence: Splice site sequence
ctggcaagtg

SEQ ID NO: 5095 - RNA, 10 nt, synthetic construct
  source 1..10: mol_type = other RNA
  misc_feature 1..10: note = Description of sequence: Splice site sequence
tgtgtggtat

SEQ ID NO: 5096 - RNA, 10 nt, synthetic construct
  source 1..10: mol_type = other RNA
  misc_feature 1..10: note = Description of sequence: Splice site sequence
tatgtatgtt

SEQ ID NO: 5097 - RNA, 10 nt, synthetic construct
  source 1..10: mol_type = other RNA
  misc_feature 1..10: note = Description of sequence: Splice site sequence
ttggtgactc

SEQ ID NO: 5098 - RNA, 10 nt, synthetic construct
  source 1..10: mol_type = other RNA
  misc_feature 1..10: note = Description of sequence: Splice site sequence
ggagtaaggt

SEQ ID NO: 5099 - RNA, 10 nt, synthetic construct
  source 1..10: mol_type = other RNA
  misc_feature 1..10: note = Description of sequence: Splice site sequence
aaggtagatg

SEQ ID NO: 5100 - RNA, 10 nt, synthetic construct
  source 1..10: mol_type = other RNA
  misc_feature 1..10: note = Description of sequence: Splice site sequence
tgggtagggt

SEQ ID NO: 5101 - RNA, 10 nt, synthetic construct
  source 1..10: mol_type = other RNA
  misc_feature 1..10: note = Description of sequence: Splice site sequence
aatgtaattc

SEQ ID NO: 5102 - RNA, 10 nt, synthetic construct
  source 1..10: mol_type = other RNA
  misc_feature 1..10: note = Description of sequence: Splice site sequence
gtggtatggc

SEQ ID NO: 5103 - RNA, 10 nt, synthetic construct
  source 1..10: mol_type = other RNA
  misc_feature 1..10: note = Description of sequence: Splice site sequence
ggagtgggtt

SEQ ID NO: 5104 - RNA, 10 nt, synthetic construct
  source 1..10: mol_type = other RNA
  misc_feature 1..10: note = Description of sequence: Splice site sequence
agggtaccac

SEQ ID NO: 5105 - RNA, 10 nt, synthetic construct
  source 1..10: mol_type = other RNA
  misc_feature 1..10: note = Description of sequence: Splice site sequence
taggtgacag

SEQ ID NO: 5106 - RNA, 10 nt, synthetic construct
  source 1..10: mol_type = other RNA
  misc_feature 1..10: note = Description of sequence: Splice site sequence
acagtaggca

SEQ ID NO: 5107 - RNA, 10 nt, synthetic construct
  source 1..10: mol_type = other RNA
  misc_feature 1..10: note = Description of sequence: Splice site sequence
atggtttgaa

SEQ ID NO: 5108 - RNA, 10 nt, synthetic construct
  source 1..10: mol_type = other RNA
  misc_feature 1..10: note = Description of sequence: Splice site sequence
gcagtaacta

SEQ ID NO: 5109 - RNA, 10 nt, synthetic construct
  source 1..10: mol_type = other RNA
  misc_feature 1..10: note = Description of sequence: Splice site sequence
ccggtaggta

SEQ ID NO: 5110 - RNA, 10 nt, synthetic construct
  source 1..10: mol_type = other RNA
  misc_feature 1..10: note = Description of sequence: Splice site sequence
agagtaggcc

SEQ ID NO: 5111 - RNA, 10 nt, synthetic construct
  source 1..10: mol_type = other RNA
  misc_feature 1..10: note = Description of sequence: Splice site sequence
aaggttgaca

SEQ ID NO: 5112 - RNA, 10 nt, synthetic construct
  source 1..10: mol_type = other RNA
  misc_feature 1..10: note = Description of sequence: Splice site sequence
ctggtgtgta

SEQ ID NO: 5113 - RNA, 10 nt, synthetic construct
  source 1..10: mol_type = other RNA
  misc_feature 1..10: note = Description of sequence: Splice site sequence
gaagtctgtc

SEQ ID NO: 5114 - RNA, 10 nt, synthetic construct
  source 1..10: mol_type = other RNA
  misc_feature 1..10: note = Description of sequence: Splice site sequence
tgggctcgga

SEQ ID NO: 5115 - RNA, 10 nt, synthetic construct
  source 1..10: mol_type = other RNA
  misc_feature 1..10: note = Description of sequence: Splice site sequence
caggtagcct

SEQ ID NO: 5116 - RNA, 10 nt, synthetic construct
  source 1..10: mol_type = other RNA
  misc_feature 1..10: note = Description of sequence: Splice site sequence
agagtaggta

SEQ ID NO: 5117 - RNA, 10 nt, synthetic construct
  source 1..10: mol_type = other RNA
  misc_feature 1..10: note = Description of sequence: Splice site sequence
taagtatgtc

SEQ ID NO: 5118 - RNA, 10 nt, synthetic construct
  source 1..10: mol_type = other RNA
  misc_feature 1..10: note = Description of sequence: Splice site sequence
ctggtatatc

SEQ ID NO: 5119 - RNA, 10 nt, synthetic construct
  source 1..10: mol_type = other RNA
  misc_feature 1..10: note = Description of sequence: Splice site sequence
gaggtgtgtt

SEQ ID NO: 5120 - RNA, 10 nt, synthetic construct
  source 1..10: mol_type = other RNA
  misc_feature 1..10: note = Description of sequence: Splice site sequence
atggtgcatg

SEQ ID NO: 5121 - RNA, 10 nt, synthetic construct
  source 1..10: mol_type = other RNA
  misc_feature 1..10: note = Description of sequence: Splice site sequence
aaggtacgcc

SEQ ID NO: 5122 - RNA, 10 nt, synthetic construct
  source 1..10: mol_type = other RNA
  misc_feature 1..10: note = Description of sequence: Splice site sequence
tgagtaacta

SEQ ID NO: 5123 - RNA, 10 nt, synthetic construct
  source 1..10: mol_type = other RNA
  misc_feature 1..10: note = Description of sequence: Splice site sequence
gaggtgacag

SEQ ID NO: 5124 - RNA, 10 nt, synthetic construct
  source 1..10: mol_type = other RNA
  misc_feature 1..10: note = Description of sequence: Splice site sequence
gttgtcctgt

SEQ ID NO: 5125 - RNA, 10 nt, synthetic construct
  source 1..10: mol_type = other RNA
  misc_feature 1..10: note = Description of sequence: Splice site sequence
ttggtgtctt

SEQ ID NO: 5126 - RNA, 10 nt, synthetic construct
  source 1..10: mol_type = other RNA
  misc_feature 1..10: note = Description of sequence: Splice site sequence
aatgtgaagg

SEQ ID NO: 5127 - RNA, 10 nt, synthetic construct
  source 1..10: mol_type = other RNA
  misc_feature 1..10: note = Description of sequence: Splice site sequence
ttggtggata

SEQ ID NO: 5128 - RNA, 10 nt, synthetic construct
  source 1..10: mol_type = other RNA
  misc_feature 1..10: note = Description of sequence: Splice site sequence
taggtgtgtt

SEQ ID NO: 5129 - RNA, 10 nt, synthetic construct
  source 1..10: mol_type = other RNA
  misc_feature 1..10: note = Description of sequence: Splice site sequence
ctggcaagtt

SEQ ID NO: 5130 - RNA, 10 nt, synthetic construct
  source 1..10: mol_type = other RNA
  misc_feature 1..10: note = Description of sequence: Splice site sequence
gcagtaagat

SEQ ID NO: 5131 - RNA, 10 nt, synthetic construct
  source 1..10: mol_type = other RNA
  misc_feature 1..10: note = Description of sequence: Splice site sequence
gcggtggaaa

SEQ ID NO: 5132 - RNA, 10 nt, synthetic construct
  source 1..10: mol_type = other RNA
  misc_feature 1..10: note = Description of sequence: Splice site sequence
tgcgtccagc

SEQ ID NO: 5133 - RNA, 10 nt, synthetic construct
  source 1..10: mol_type = other RNA
  misc_feature 1..10: note = Description of sequence: Splice site sequence
aaagtggagt

SEQ ID NO: 5134 - RNA, 10 nt, synthetic construct
  source 1..10: mol_type = other RNA
  misc_feature 1..10: note = Description of sequence: Splice site sequence
cgtgtgagcc

SEQ ID NO: 5135 - RNA, 10 nt, synthetic construct
  source 1..10: mol_type = other RNA
  misc_feature 1..10: note = Description of sequence: Splice site sequence
agagtactgt

SEQ ID NO: 5136 - RNA, 10 nt, synthetic construct
  source 1..10: mol_type = other RNA
  misc_feature 1..10: note = Description of sequence: Splice site sequence
caggtatagc

SEQ ID NO: 5137 - RNA, 10 nt, synthetic construct
  source 1..10: mol_type = other RNA
  misc_feature 1..10: note = Description of sequence: Splice site sequence
tacgtaagga

SEQ ID NO: 5138 - RNA, 10 nt, synthetic construct
  source 1..10: mol_type = other RNA
  misc_feature 1..10: note = Description of sequence: Splice site sequence
aaggtcttta

SEQ ID NO: 5139 - RNA, 10 nt, synthetic construct
  source 1..10: mol_type = other RNA
  misc_feature 1..10: note = Description of sequence: Splice site sequence
aaggtggtct

SEQ ID NO: 5140 - RNA, 10 nt, synthetic construct
  source 1..10: mol_type = other RNA
  misc_feature 1..10: note = Description of sequence: Splice site sequence
ggggtaaatt

SEQ ID NO: 5141 - RNA, 10 nt, synthetic construct
  source 1..10: mol_type = other RNA
  misc_feature 1..10: note = Description of sequence: Splice site sequence
tcagtgagga

SEQ ID NO: 5142 - RNA, 10 nt, synthetic construct
  source 1..10: mol_type = other RNA
  misc_feature 1..10: note = Description of sequence: Splice site sequence
agagtacgtt

SEQ ID NO: 5143 - RNA, 10 nt, synthetic construct
  source 1..10: mol_type = other RNA
  misc_feature 1..10: note = Description of sequence: Splice site sequence
gaggtcgtca

SEQ ID NO: 5144 - RNA, 10 nt, synthetic construct
  source 1..10: mol_type = other RNA
  misc_feature 1..10: note = Description of sequence: Splice site sequence
taggtttgat

SEQ ID NO: 5145 - RNA, 10 nt, synthetic construct
  source 1..10: mol_type = other RNA
  misc_feature 1..10: note = Description of sequence: Splice site sequence
catgtaaacc

SEQ ID NO: 5146 - RNA, 10 nt, synthetic construct
  source 1..10: mol_type = other RNA
  misc_feature 1..10: note = Description of sequence: Splice site sequence
aaggtggcac

SEQ ID NO: 5147 - RNA, 10 nt, synthetic construct
  source 1..10: mol_type = other RNA
  misc_feature 1..10: note = Description of sequence: Splice site sequence
caggtagatg

SEQ ID NO: 5148 - RNA, 10 nt, synthetic construct
  source 1..10: mol_type = other RNA
  misc_feature 1..10: note = Description of sequence: Splice site sequence
aacgtaaaag

SEQ ID NO: 5149 - RNA, 10 nt, synthetic construct
  source 1..10: mol_type = other RNA
  misc_feature 1..10: note = Description of sequence: Splice site sequence
taggtctctg

SEQ ID NO: 5150 - RNA, 10 nt, synthetic construct
  source 1..10: mol_type = other RNA
  misc_feature 1..10: note = Description of sequence: Splice site sequence
atagtaggtg

SEQ ID NO: 5151 - RNA, 10 nt, synthetic construct
  source 1..10: mol_type = other RNA
  misc_feature 1..10: note = Description of sequence: Splice site sequence
taggcaagag

SEQ ID NO: 5152 - RNA, 10 nt, synthetic construct
  source 1..10: mol_type = other RNA
  misc_feature 1..10: note = Description of sequence: Splice site sequence
taggcacggc

SEQ ID NO: 5153 - RNA, 10 nt, synthetic construct
  source 1..10: mol_type = other RNA
  misc_feature 1..10: note = Description of sequence: Splice site sequence
aaggtcttca

SEQ ID NO: 5154 - RNA, 10 nt, synthetic construct
  source 1..10: mol_type = other RNA
  misc_feature 1..10: note = Description of sequence: Splice site sequence
ccagtatgct

SEQ ID NO: 5155 - RNA, 10 nt, synthetic construct
  source 1..10: mol_type = other RNA
  misc_feature 1..10: note = Description of sequence: Splice site sequence
caagtgagtt

SEQ ID NO: 5156 - RNA, 10 nt, synthetic construct
  source 1..10: mol_type = other RNA
  misc_feature 1..10: note = Description of sequence: Splice site sequence
caggtctcaa

SEQ ID NO: 5157 - RNA, 10 nt, synthetic construct
  source 1..10: mol_type = other RNA
  misc_feature 1..10: note = Description of sequence: Splice site sequence
caggttacat

SEQ ID NO: 5158 - RNA, 10 nt, synthetic construct
  source 1..10: mol_type = other RNA
  misc_feature 1..10: note = Description of sequence: Splice site sequence
ggagtgagca

SEQ ID NO: 5159 - RNA, 10 nt, synthetic construct
  source 1..10: mol_type = other RNA
  misc_feature 1..10: note = Description of sequence: Splice site sequence
agagtacgca

SEQ ID NO: 5160 - RNA, 10 nt, synthetic construct
  source 1..10: mol_type = other RNA
  misc_feature 1..10: note = Description of sequence: Splice site sequence
ctggtgttgg

SEQ ID NO: 5161 - RNA, 10 nt, synthetic construct
  source 1..10: mol_type = other RNA
  misc_feature 1..10: note = Description of sequence: Splice site sequence
aaggtactca

SEQ ID NO: 5162 - RNA, 10 nt, synthetic construct
  source 1..10: mol_type = other RNA
  misc_feature 1..10: note = Description of sequence: Splice site sequence
ctagtaaggg

SEQ ID NO: 5163 - RNA, 10 nt, synthetic construct
  source 1..10: mol_type = other RNA
  misc_feature 1..10: note = Description of sequence: Splice site sequence
agagtaaaag

SEQ ID NO: 5164 - RNA, 10 nt, synthetic construct
  source 1..10: mol_type = other RNA
  misc_feature 1..10: note = Description of sequence: Splice site sequence
aaggtaacga

SEQ ID NO: 5165 - RNA, 10 nt, synthetic construct
  source 1..10: mol_type = other RNA
  misc_feature 1..10: note = Description of sequence: Splice site sequence
ctggtccccg

SEQ ID NO: 5166 - RNA, 10 nt, synthetic construct
  source 1..10: mol_type = other RNA
  misc_feature 1..10: note = Description of sequence: Splice site sequence
taagtatggg

SEQ ID NO: 5167 - RNA, 10 nt, synthetic construct
  source 1..10: mol_type = other RNA
  misc_feature 1..10: note = Description of sequence: Splice site sequence
gaggtcgagc

SEQ ID NO: 5168 - RNA, 10 nt, synthetic construct
  source 1..10: mol_type = other RNA
  misc_feature 1..10: note = Description of sequence: Splice site sequence
ttggtatata

SEQ ID NO: 5169 - RNA, 10 nt, synthetic construct
  source 1..10: mol_type = other RNA
  misc_feature 1..10: note = Description of sequence: Splice site sequence
aaagtcaagg

SEQ ID NO: 5170 - RNA, 10 nt, synthetic construct
  source 1..10: mol_type = other RNA
  misc_feature 1..10: note = Description of sequence: Splice site sequence
aaggtctagg

SEQ ID NO: 5171 - RNA, 10 nt, synthetic construct
  source 1..10: mol_type = other RNA
  misc_feature 1..10: note = Description of sequence: Splice site sequence
cgagtaggtc

SEQ ID NO: 5172 - RNA, 10 nt, synthetic construct
  source 1..10: mol_type = other RNA
  misc_feature 1..10: note = Description of sequence: Splice site sequence
agggttcgtt

SEQ ID NO: 5173 - RNA, 10 nt, synthetic construct
  source 1..10: mol_type = other RNA
  misc_feature 1..10: note = Description of sequence: Splice site sequence
gaggcaggcc

SEQ ID NO: 5174 - RNA, 10 nt, synthetic construct
  source 1..10: mol_type = other RNA
  misc_feature 1..10: note = Description of sequence: Splice site sequence
ctagtattac

SEQ ID NO: 5175 - RNA, 10 nt, synthetic construct
  source 1..10: mol_type = other RNA
  misc_feature 1..10: note = Description of sequence: Splice site sequence
acggtatgtg

SEQ ID NO: 5176 - RNA, 10 nt, synthetic construct
  source 1..10: mol_type = other RNA
  misc_feature 1..10: note = Description of sequence: Splice site sequence
taggtggttc

SEQ ID NO: 5177 - RNA, 10 nt, synthetic construct
  source 1..10: mol_type = other RNA
  misc_feature 1..10: note = Description of sequence: Splice site sequence
agagtataac

SEQ ID NO: 5178 - RNA, 10 nt, synthetic construct
  source 1..10: mol_type = other RNA
  misc_feature 1..10: note = Description of sequence: Splice site sequence
ttggtgcgtc

SEQ ID NO: 5179 - RNA, 10 nt, synthetic construct
  source 1..10: mol_type = other RNA
  misc_feature 1..10: note = Description of sequence: Splice site sequence
accgttatct

SEQ ID NO: 5180 - RNA, 10 nt, synthetic construct
  source 1..10: mol_type = other RNA
  misc_feature 1..10: note = Description of sequence: Splice site sequence
ccagtgatga

SEQ ID NO: 5181 - RNA, 10 nt, synthetic construct
  source 1..10: mol_type = other RNA
  misc_feature 1..10: note = Description of sequence: Splice site sequence
gaagtatgca

SEQ ID NO: 5182 - RNA, 10 nt, synthetic construct
  source 1..10: mol_type = other RNA
  misc_feature 1..10: note = Description of sequence: Splice site sequence
gaagtatggc

SEQ ID NO: 5183 - RNA, 10 nt, synthetic construct
  source 1..10: mol_type = other RNA
  misc_feature 1..10: note = Description of sequence: Splice site sequence
ccggtaggac

SEQ ID NO: 5184 - RNA, 10 nt, synthetic construct
  source 1..10: mol_type = other RNA
  misc_feature 1..10: note = Description of sequence: Splice site sequence
aatgtaagca

SEQ ID NO: 5185 - RNA, 10 nt, synthetic construct
  source 1..10: mol_type = other RNA
  misc_feature 1..10: note = Description of sequence: Splice site sequence
agagtaattg

SEQ ID NO: 5186 - RNA, 10 nt, synthetic construct
  source 1..10: mol_type = other RNA
  misc_feature 1..10: note = Description of sequence: Splice site sequence
agggttggtt

SEQ ID NO: 5187 - RNA, 10 nt, synthetic construct
  source 1..10: mol_type = other RNA
  misc_feature 1..10: note = Description of sequence: Splice site sequence
gtggtaggag

SEQ ID NO: 5188 - RNA, 10 nt, synthetic construct
  source 1..10: mol_type = other RNA
  misc_feature 1..10: note = Description of sequence: Splice site sequence
aaggcagttt

SEQ ID NO: 5189 - RNA, 10 nt, synthetic construct
  source 1..10: mol_type = other RNA
  misc_feature 1..10: note = Description of sequence: Splice site sequence
caagtaagcc

SEQ ID NO: 5190 - RNA, 10 nt, synthetic construct
  source 1..10: mol_type = other RNA
  misc_feature 1..10: note = Description of sequence: Splice site sequence
ctggcaagta

SEQ ID NO: 5191 - RNA, 10 nt, synthetic construct
  source 1..10: mol_type = other RNA
  misc_feature 1..10: note = Description of sequence: Splice site sequence
caggcatgat

SEQ ID NO: 5192 - RNA, 10 nt, synthetic construct
  source 1..10: mol_type = other RNA
  misc_feature 1..10: note = Description of sequence: Splice site sequence
agggtaattg

SEQ ID NO: 5193 - RNA, 10 nt, synthetic construct
  source 1..10: mol_type = other RNA
  misc_feature 1..10: note = Description of sequence: Splice site sequence
ggggtaacct

SEQ ID NO: 5194 - RNA, 10 nt, synthetic construct
  source 1..10: mol_type = other RNA
  misc_feature 1..10: note = Description of sequence: Splice site sequence
aaagtaacta

SEQ ID NO: 5195 - RNA, 10 nt, synthetic construct
  source 1..10: mol_type = other RNA
  misc_feature 1..10: note = Description of sequence: Splice site sequence
taggtctgcc

SEQ ID NO: 5196 - RNA, 10 nt, synthetic construct
  source 1..10: mol_type = other RNA
  misc_feature 1..10: note = Description of sequence: Splice site sequence
acggtatgaa

SEQ ID NO: 5197 - RNA, 10 nt, synthetic construct
  source 1..10: mol_type = other RNA
  misc_feature 1..10: note = Description of sequence: Splice site sequence
agtgtatggg

SEQ ID NO: 5198 - RNA, 10 nt, synthetic construct
  source 1..10: mol_type = other RNA
  misc_feature 1..10: note = Description of sequence: Splice site sequence
tgggttggca

SEQ ID NO: 5199 - RNA, 10 nt, synthetic construct
  source 1..10: mol_type = other RNA
  misc_feature 1..10: note = Description of sequence: Splice site sequence
taggtaaact

SEQ ID NO: 5200 - RNA, 10 nt, synthetic construct
  source 1..10: mol_type = other RNA
  misc_feature 1..10: note = Description of sequence: Splice site sequence
agagtgggta

SEQ ID NO: 5201 - RNA, 10 nt, synthetic construct
  source 1..10: mol_type = other RNA
  misc_feature 1..10: note = Description of sequence: Splice site sequence
agagtatttg

SEQ ID NO: 5202 - RNA, 10 nt, synthetic construct
  source 1..10: mol_type = other RNA
  misc_feature 1..10: note = Description of sequence: Splice site sequence
agtgtaggaa

SEQ ID NO: 5203 - RNA, 10 nt, synthetic construct
  source 1..10: mol_type = other RNA
  misc_feature 1..10: note = Description of sequence: Splice site sequence
cttgtacgta

SEQ ID NO: 5204 - RNA, 10 nt, synthetic construct
  source 1..10: mol_type = other RNA
  misc_feature 1..10: note = Description of sequence: Splice site sequence
gatgtgagat

SEQ ID NO: 5205 - RNA, 10 nt, synthetic construct
  source 1..10: mol_type = other RNA
  misc_feature 1..10: note = Description of sequence: Splice site sequence
caggcagcca

SEQ ID NO: 5206 - RNA, 10 nt, synthetic construct
  source 1..10: mol_type = other RNA
  misc_feature 1..10: note = Description of sequence: Splice site sequence
aaggtcactg

SEQ ID NO: 5207 - RNA, 10 nt, synthetic construct
  source 1..10: mol_type = other RNA
  misc_feature 1..10: note = Description of sequence: Splice site sequence
aaggtctgac

SEQ ID NO: 5208 - RNA, 10 nt, synthetic construct
  source 1..10: mol_type = other RNA
  misc_feature 1..10: note = Description of sequence: Splice site sequence
taggttcctt

SEQ ID NO: 5209 - RNA, 10 nt, synthetic construct
  source 1..10: mol_type = other RNA
  misc_feature 1..10: note = Description of sequence: Splice site sequence
ctggtgcttt

SEQ ID NO: 5210 - RNA, 10 nt, synthetic construct
  source 1..10: mol_type = other RNA
  misc_feature 1..10: note = Description of sequence: Splice site sequence
tgagttggtg

SEQ ID NO: 5211 - RNA, 10 nt, synthetic construct
  source 1..10: mol_type = other RNA
  misc_feature 1..10: note = Description of sequence: Splice site sequence
ttggtgggat

SEQ ID NO: 5212 - RNA, 10 nt, synthetic construct
  source 1..10: mol_type = other RNA
  misc_feature 1..10: note = Description of sequence: Splice site sequence
tgagtagggt

SEQ ID NO: 5213 - RNA, 10 nt, synthetic construct
  source 1..10: mol_type = other RNA
  misc_feature 1..10: note = Description of sequence: Splice site sequence
tcggtgaggt

SEQ ID NO: 5214 - RNA, 10 nt, synthetic construct
  source 1..10: mol_type = other RNA
  misc_feature 1..10: note = Description of sequence: Splice site sequence
aaagtaaaga

SEQ ID NO: 5215 - RNA, 10 nt, synthetic construct
  source 1..10: mol_type = other RNA
  misc_feature 1..10: note = Description of sequence: Splice site sequence
aaggcaagtc

SEQ ID NO: 5216 - RNA, 10 nt, synthetic construct
  source 1..10: mol_type = other RNA
  misc_feature 1..10: note = Description of sequence: Splice site sequence
cgggtaaagc

SEQ ID NO: 5217 - RNA, 10 nt, synthetic construct
  source 1..10: mol_type = other RNA
  misc_feature 1..10: note = Description of sequence: Splice site sequence
aaagttagtt

SEQ ID NO: 5218 - RNA, 10 nt, synthetic construct
  source 1..10: mol_type = other RNA
  misc_feature 1..10: note = Description of sequence: Splice site sequence
ttagtaagca

SEQ ID NO: 5219 - RNA, 10 nt, synthetic construct
  source 1..10: mol_type = other RNA
  misc_feature 1..10: note = Description of sequence: Splice site sequence
gaggtcacat

SEQ ID NO: 5220 - RNA, 10 nt, synthetic construct
  source 1..10: mol_type = other RNA
  misc_feature 1..10: note = Description of sequence: Splice site sequence
taagtggtat

SEQ ID NO: 5221 - RNA, 10 nt, synthetic construct
  source 1..10: mol_type = other RNA
  misc_feature 1..10: note = Description of sequence: Splice site sequence
taggtgcttt

SEQ ID NO: 5222 - RNA, 10 nt, synthetic construct
  source 1..10: mol_type = other RNA
  misc_feature 1..10: note = Description of sequence: Splice site sequence
ggagtaggca

SEQ ID NO: 5223 - RNA, 10 nt, synthetic construct
  source 1..10: mol_type = other RNA
  misc_feature 1..10: note = Description of sequence: Splice site sequence
tgagtaagga

SEQ ID NO: 5224 - RNA, 10 nt, synthetic construct
  source 1..10: mol_type = other RNA
  misc_feature 1..10: note = Description of sequence: Splice site sequence
caggtggagc

SEQ ID NO: 5225 - RNA, 10 nt, synthetic construct
  source 1..10: mol_type = other RNA
  misc_feature 1..10: note = Description of sequence: Splice site sequence
gatgtagaag

SEQ ID NO: 5226 - RNA, 10 nt, synthetic construct
  source 1..10: mol_type = other RNA
  misc_feature 1..10: note = Description of sequence: Splice site sequence
aatgcctgcc

SEQ ID NO: 5227 - RNA, 10 nt, synthetic construct
  source 1..10: mol_type = other RNA
  misc_feature 1..10: note = Description of sequence: Splice site sequence
atggtaaggc

SEQ ID NO: 5228 - RNA, 10 nt, synthetic construct
  source 1..10: mol_type = other RNA
  misc_feature 1..10: note = Description of sequence: Splice site sequence
tgggtaatat

SEQ ID NO: 5229 - RNA, 10 nt, synthetic construct
  source 1..10: mol_type = other RNA
  misc_feature 1..10: note = Description of sequence: Splice site sequence
ctggtacctc

SEQ ID NO: 5230 - RNA, 10 nt, synthetic construct
  source 1..10: mol_type = other RNA
  misc_feature 1..10: note = Description of sequence: Splice site sequence
cacgtgagcc

SEQ ID NO: 5231 - RNA, 10 nt, synthetic construct
  source 1..10: mol_type = other RNA
  misc_feature 1..10: note = Description of sequence: Splice site sequence
tgagtttgtg

SEQ ID NO: 5232 - RNA, 10 nt, synthetic construct
  source 1..10: mol_type = other RNA
  misc_feature 1..10: note = Description of sequence: Splice site sequence
ccggtagtgt

SEQ ID NO: 5233 - RNA, 10 nt, synthetic construct
  source 1..10: mol_type = other RNA
  misc_feature 1..10: note = Description of sequence: Splice site sequence
aaagtgacaa

SEQ ID NO: 5234 - RNA, 10 nt, synthetic construct
  source 1..10: mol_type = other RNA
  misc_feature 1..10: note = Description of sequence: Splice site sequence
gaagtgggtt

SEQ ID NO: 5235 - RNA, 10 nt, synthetic construct
  source 1..10: mol_type = other RNA
  misc_feature 1..10: note = Description of sequence: Splice site sequence
caggtgcagc

SEQ ID NO: 5236 - RNA, 10 nt, synthetic construct
  source 1..10: mol_type = other RNA
  misc_feature 1..10: note = Description of sequence: Splice site sequence
gaggtgggcc

SEQ ID NO: 5237 - RNA, 10 nt, synthetic construct
  source 1..10: mol_type = other RNA
  misc_feature 1..10: note = Description of sequence: Splice site sequence
tatgtgcgtc

SEQ ID NO: 5238 - RNA, 10 nt, synthetic construct
  source 1..10: mol_type = other RNA
  misc_feature 1..10: note = Description of sequence: Splice site sequence
ggggtactgg

SEQ ID NO: 5239 - RNA, 10 nt, synthetic construct
  source 1..10: mol_type = other RNA
  misc_feature 1..10: note = Description of sequence: Splice site sequence
ctggtaggtt

SEQ ID NO: 5240 - RNA, 10 nt, synthetic construct
  source 1..10: mol_type = other RNA
  misc_feature 1..10: note = Description of sequence: Splice site sequence
ttggcatgtt

SEQ ID NO: 5241 - RNA, 10 nt, synthetic construct
  source 1..10: mol_type = other RNA
  misc_feature 1..10: note = Description of sequence: Splice site sequence
aatgtaatac

SEQ ID NO: 5242 - RNA, 10 nt, synthetic construct
  source 1..10: mol_type = other RNA
  misc_feature 1..10: note = Description of sequence: Splice site sequence
taggccggtg

SEQ ID NO: 5243 - RNA, 10 nt, synthetic construct
  source 1..10: mol_type = other RNA
  misc_feature 1..10: note = Description of sequence: Splice site sequence
agagtcagta

SEQ ID NO: 5244 - RNA, 10 nt, synthetic construct
  source 1..10: mol_type = other RNA
  misc_feature 1..10: note = Description of sequence: Splice site sequence
taagtaaatc

SEQ ID NO: 5245 - RNA, 10 nt, synthetic construct
  source 1..10: mol_type = other RNA
  misc_feature 1..10: note = Description of sequence: Splice site sequence
caggttcctc

SEQ ID NO: 5246 - RNA, 10 nt, synthetic construct
  source 1..10: mol_type = other RNA
  misc_feature 1..10: note = Description of sequence: Splice site sequence
taggtacgat

SEQ ID NO: 5247 - RNA, 10 nt, synthetic construct
  source 1..10: mol_type = other RNA
  misc_feature 1..10: note = Description of sequence: Splice site sequence
agagttagtg

SEQ ID NO: 5248 - RNA, 10 nt, synthetic construct
  source 1..10: mol_type = other RNA
  misc_feature 1..10: note = Description of sequence: Splice site sequence
gcagtaagtg

SEQ ID NO: 5249 - RNA, 10 nt, synthetic construct
  source 1..10: mol_type = other RNA
  misc_feature 1..10: note = Description of sequence: Splice site sequence
agggtggtag

SEQ ID NO: 5250 - RNA, 10 nt, synthetic construct
  source 1..10: mol_type = other RNA
  misc_feature 1..10: note = Description of sequence: Splice site sequence
ggagtaatgt

SEQ ID NO: 5251 - RNA, 10 nt, synthetic construct
  source 1..10: mol_type = other RNA
  misc_feature 1..10: note = Description of sequence: Splice site sequence
gatgtaagtc

SEQ ID NO: 5252 - RNA, 10 nt, synthetic construct
  source 1..10: mol_type = other RNA
  misc_feature 1..10: note = Description of sequence: Splice site sequence
ccagtttcgt

SEQ ID NO: 5253 - RNA, 10 nt, synthetic construct
  source 1..10: mol_type = other RNA
  misc_feature 1..10: note = Description of sequence: Splice site sequence
aaggttcggg

SEQ ID NO: 5254 - RNA, 10 nt, synthetic construct
  source 1..10: mol_type = other RNA
  misc_feature 1..10: note = Description of sequence: Splice site sequence
atggtggagt

SEQ ID NO: 5255 - RNA, 10 nt, synthetic construct
  source 1..10: mol_type = other RNA
  misc_feature 1..10: note = Description of sequence: Splice site sequence
aaggtaccgg

SEQ ID NO: 5256 - RNA, 10 nt, synthetic construct
  source 1..10: mol_type = other RNA
  misc_feature 1..10: note = Description of sequence: Splice site sequence
gaagtgcgaa

SEQ ID NO: 5257 - RNA, 10 nt, synthetic construct
  source 1..10: mol_type = other RNA
  misc_feature 1..10: note = Description of sequence: Splice site sequence
tgggtcagtt

SEQ ID NO: 5258 - RNA, 10 nt, synthetic construct
  source 1..10: mol_type = other RNA
  misc_feature 1..10: note = Description of sequence: Splice site sequence
aaggtgtaga

SEQ ID NO: 5259 - RNA, 10 nt, synthetic construct
  source 1..10: mol_type = other RNA
  misc_feature 1..10: note = Description of sequence: Splice site sequence
tgggtaggcc

SEQ ID NO: 5260 - RNA, 10 nt, synthetic construct
  source 1..10: mol_type = other RNA
  misc_feature 1..10: note = Description of sequence: Splice site sequence
ccagtgagtc

SEQ ID NO: 5261 - RNA, 10 nt, synthetic construct
  source 1..10: mol_type = other RNA
  misc_feature 1..10: note = Description of sequence: Splice site sequence
aaggtcactt

SEQ ID NO: 5262 - RNA, 10 nt, synthetic construct
  source 1..10: mol_type = other RNA
  misc_feature 1..10: note = Description of sequence: Splice site sequence
agcgtgaggc

SEQ ID NO: 5263 - RNA, 10 nt, synthetic construct
  source 1..10: mol_type = other RNA
  misc_feature 1..10: note = Description of sequence: Splice site sequence
tccgtggtaa

SEQ ID NO: 5264 - RNA, 10 nt, synthetic construct
  source 1..10: mol_type = other RNA
  misc_feature 1..10: note = Description of sequence: Splice site sequence
agagtactta

SEQ ID NO: 5265 - RNA, 10 nt, synthetic construct
  source 1..10: mol_type = other RNA
  misc_feature 1..10: note = Description of sequence: Splice site sequence
ggggtcagat

SEQ ID NO: 5266 - RNA, 10 nt, synthetic construct
  source 1..10: mol_type = other RNA
  misc_feature 1..10: note = Description of sequence: Splice site sequence
aaggtggacc

SEQ ID NO: 5267 - RNA, 10 nt, synthetic construct
  source 1..10: mol_type = other RNA
  misc_feature 1..10: note = Description of sequence: Splice site sequence
agagtgagcg

SEQ ID NO: 5268 - RNA, 10 nt, synthetic construct
  source 1..10: mol_type = other RNA
  misc_feature 1..10: note = Description of sequence: Splice site sequence
agagtcagat

SEQ ID NO: 5269 - RNA, 10 nt, synthetic construct
  source 1..10: mol_type = other RNA
  misc_feature 1..10: note = Description of sequence: Splice site sequence
taagtattac

SEQ ID NO: 5270 - RNA, 10 nt, synthetic construct
  source 1..10: mol_type = other RNA
  misc_feature 1..10: note = Description of sequence: Splice site sequence
agagtatttc

SEQ ID NO: 5271 - RNA, 10 nt, synthetic construct
  source 1..10: mol_type = other RNA
  misc_feature 1..10: note = Description of sequence: Splice site sequence
agagttcagc

SEQ ID NO: 5272 - RNA, 10 nt, synthetic construct
  source 1..10: mol_type = other RNA
  misc_feature 1..10: note = Description of sequence: Splice site sequence
atggtgaagt

SEQ ID NO: 5273 - RNA, 10 nt, synthetic construct
  source 1..10: mol_type = other RNA
  misc_feature 1..10: note = Description of sequence: Splice site sequence
taggtgatcc

SEQ ID NO: 5274 - RNA, 10 nt, synthetic construct
  source 1..10: mol_type = other RNA
  misc_feature 1..10: note = Description of sequence: Splice site sequence
ggagtaagat

SEQ ID NO: 5275 - RNA, 10 nt, synthetic construct
  source 1..10: mol_type = other RNA
  misc_feature 1..10: note = Description of sequence: Splice site sequence
taggtaccaa

SEQ ID NO: 5276 - RNA, 10 nt, synthetic construct
  source 1..10: mol_type = other RNA
  misc_feature 1..10: note = Description of sequence: Splice site sequence
agagttggtc

SEQ ID NO: 5277 - RNA, 10 nt, synthetic construct
  source 1..10: mol_type = other RNA
  misc_feature 1..10: note = Description of sequence: Splice site sequence
gaagtgagac

SEQ ID NO: 5278 - RNA, 10 nt, synthetic construct
  source 1..10: mol_type = other RNA
  misc_feature 1..10: note = Description of sequence: Splice site sequence
atcgtaggtt

SEQ ID NO: 5279 - RNA, 10 nt, synthetic construct
  source 1..10: mol_type = other RNA
  misc_feature 1..10: note = Description of sequence: Splice site sequence
gaggtacgct

SEQ ID NO: 5280 - RNA, 10 nt, synthetic construct
  source 1..10: mol_type = other RNA
  misc_feature 1..10: note = Description of sequence: Splice site sequence
acggtaaggg

SEQ ID NO: 5281 - RNA, 10 nt, synthetic construct
  source 1..10: mol_type = other RNA
  misc_feature 1..10: note = Description of sequence: Splice site sequence
caggcatgtc

SEQ ID NO: 5282 - RNA, 10 nt, synthetic construct
  source 1..10: mol_type = other RNA
  misc_feature 1..10: note = Description of sequence: Splice site sequence
ttagtaagat

SEQ ID NO: 5283 - RNA, 10 nt, synthetic construct
  source 1..10: mol_type = other RNA
  misc_feature 1..10: note = Description of sequence: Splice site sequence
tgagtaggtt

SEQ ID NO: 5284 - RNA, 10 nt, synthetic construct
  source 1..10: mol_type = other RNA
  misc_feature 1..10: note = Description of sequence: Splice site sequence
agggtacgaa

SEQ ID NO: 5285 - RNA, 10 nt, synthetic construct
  source 1..10: mol_type = other RNA
  misc_feature 1..10: note = Description of sequence: Splice site sequence
acggtatgtt

SEQ ID NO: 5286 - RNA, 10 nt, synthetic construct
  source 1..10: mol_type = other RNA
  misc_feature 1..10: note = Description of sequence: Splice site sequence
agggtactgt

SEQ ID NO: 5287 - RNA, 10 nt, synthetic construct
  source 1..10: mol_type = other RNA
  misc_feature 1..10: note = Description of sequence: Splice site sequence
ttggtatgga

SEQ ID NO: 5288 - RNA, 10 nt, synthetic construct
  source 1..10: mol_type = other RNA
  misc_feature 1..10: note = Description of sequence: Splice site sequence
taagtaactg

SEQ ID NO: 5289 - RNA, 10 nt, synthetic construct
  source 1..10: mol_type = other RNA
  misc_feature 1..10: note = Description of sequence: Splice site sequence
gcggtcagcc

SEQ ID NO: 5290 - RNA, 10 nt, synthetic construct
  source 1..10: mol_type = other RNA
  misc_feature 1..10: note = Description of sequence: Splice site sequence
tttgtgagtc

SEQ ID NO: 5291 - RNA, 10 nt, synthetic construct
  source 1..10: mol_type = other RNA
  misc_feature 1..10: note = Description of sequence: Splice site sequence
gtggtcagtg

SEQ ID NO: 5292 - RNA, 10 nt, synthetic construct
  source 1..10: mol_type = other RNA
  misc_feature 1..10: note = Description of sequence: Splice site sequence
ctggtctgta

SEQ ID NO: 5293 - RNA, 10 nt, synthetic construct
  source 1..10: mol_type = other RNA
  misc_feature 1..10: note = Description of sequence: Splice site sequence
gaggttctta

SEQ ID NO: 5294 - RNA, 10 nt, synthetic construct
  source 1..10: mol_type = other RNA
  misc_feature 1..10: note = Description of sequence: Splice site sequence
atggtactga

SEQ ID NO: 5295 - RNA, 10 nt, synthetic construct
  source 1..10: mol_type = other RNA
  misc_feature 1..10: note = Description of sequence: Splice site sequence
aatgtgcttt

SEQ ID NO: 5296 - RNA, 10 nt, synthetic construct
  source 1..10: mol_type = other RNA
  misc_feature 1..10: note = Description of sequence: Splice site sequence
agggtggcgt

SEQ ID NO: 5297 - RNA, 10 nt, synthetic construct
  source 1..10: mol_type = other RNA
  misc_feature 1..10: note = Description of sequence: Splice site sequence
ccggcaggaa

SEQ ID NO: 5298 - RNA, 10 nt, synthetic construct
  source 1..10: mol_type = other RNA
  misc_feature 1..10: note = Description of sequence: Splice site sequence
catgtgggtc

SEQ ID NO: 5299 - RNA, 10 nt, synthetic construct
  source 1..10: mol_type = other RNA
  misc_feature 1..10: note = Description of sequence: Splice site sequence
ttggtttgtt

SEQ ID NO: 5300 - RNA, 10 nt, synthetic construct
  source 1..10: mol_type = other RNA
  misc_feature 1..10: note = Description of sequence: Splice site sequence
caggttctgt

SEQ ID NO: 5301 - RNA, 10 nt, synthetic construct
  source 1..10: mol_type = other RNA
  misc_feature 1..10: note = Description of sequence: Splice site sequence
acggtaagcg

SEQ ID NO: 5302 - RNA, 10 nt, synthetic construct
  source 1..10: mol_type = other RNA
  misc_feature 1..10: note = Description of sequence: Splice site sequence
ctggtcagta

SEQ ID NO: 5303 - RNA, 10 nt, synthetic construct
  source 1..10: mol_type = other RNA
  misc_feature 1..10: note = Description of sequence: Splice site sequence
tcagtaggct

SEQ ID NO: 5304 - RNA, 10 nt, synthetic construct
  source 1..10: mol_type = other RNA
  misc_feature 1..10: note = Description of sequence: Splice site sequence
tgagtaggac

SEQ ID NO: 5305 - RNA, 10 nt, synthetic construct
  source 1..10: mol_type = other RNA
  misc_feature 1..10: note = Description of sequence: Splice site sequence
caggttttaa

SEQ ID NO: 5306 - RNA, 10 nt, synthetic construct
  source 1..10: mol_type = other RNA
  misc_feature 1..10: note = Description of sequence: Splice site sequence
gaggtgtccc

SEQ ID NO: 5307 - RNA, 10 nt, synthetic construct
  source 1..10: mol_type = other RNA
  misc_feature 1..10: note = Description of sequence: Splice site sequence
agggtgggtt

SEQ ID NO: 5308 - RNA, 10 nt, synthetic construct
  source 1..10: mol_type = other RNA
  misc_feature 1..10: note = Description of sequence: Splice site sequence
gtggtgagac

SEQ ID NO: 5309 - RNA, 10 nt, synthetic construct
  source 1..10: mol_type = other RNA
  misc_feature 1..10: note = Description of sequence: Splice site sequence
cacgtaggga

SEQ ID NO: 5310 - RNA, 10 nt, synthetic construct
  source 1..10: mol_type = other RNA
  misc_feature 1..10: note = Description of sequence: Splice site sequence
gtggtatttt

SEQ ID NO: 5311 - RNA, 10 nt, synthetic construct
  source 1..10: mol_type = other RNA
  misc_feature 1..10: note = Description of sequence: Splice site sequence
gagatatcct

SEQ ID NO: 5312 - RNA, 10 nt, synthetic construct
  source 1..10: mol_type = other RNA
  misc_feature 1..10: note = Description of sequence: Splice site sequence
aaggtgaaca

SEQ ID NO: 5313 - RNA, 10 nt, synthetic construct
  source 1..10: mol_type = other RNA
  misc_feature 1..10: note = Description of sequence: Splice site sequence
taagtagggc

SEQ ID NO: 5314 - RNA, 10 nt, synthetic construct
  source 1..10: mol_type = other RNA
  misc_feature 1..10: note = Description of sequence: Splice site sequence
ctggtgcggg

SEQ ID NO: 5315 - RNA, 10 nt, synthetic construct
  source 1..10: mol_type = other RNA
  misc_feature 1..10: note = Description of sequence: Splice site sequence
ctggtcaata

SEQ ID NO: 5316 - RNA, 10 nt, synthetic construct
  source 1..10: mol_type = other RNA
  misc_feature 1..10: note = Description of sequence: Splice site sequence
agagtaaaaa

SEQ ID NO: 5317 - RNA, 10 nt, synthetic construct
  source 1..10: mol_type = other RNA
  misc_feature 1..10: note = Description of sequence: Splice site sequence
aaggtgcagt

SEQ ID NO: 5318 - RNA, 10 nt, synthetic construct
  source 1..10: mol_type = other RNA
  misc_feature 1..10: note = Description of sequence: Splice site sequence
cgggtaagca

SEQ ID NO: 5319 - RNA, 10 nt, synthetic construct
  source 1..10: mol_type = other RNA
  misc_feature 1..10: note = Description of sequence: Splice site sequence
aaagtgagcc

SEQ ID NO: 5320 - RNA, 10 nt, synthetic construct
  source 1..10: mol_type = other RNA
  misc_feature 1..10: note = Description of sequence: Splice site sequence
atggtaatca

SEQ ID NO: 5321 - RNA, 10 nt, synthetic construct
  source 1..10: mol_type = other RNA
  misc_feature 1..10: note = Description of sequence: Splice site sequence
gcagtacgtg

SEQ ID NO: 5322 - RNA, 10 nt, synthetic construct
  source 1..10: mol_type = other RNA
  misc_feature 1..10: note = Description of sequence: Splice site sequence
atggtacatg

SEQ ID NO: 5323 - RNA, 10 nt, synthetic construct
  source 1..10: mol_type = other RNA
  misc_feature 1..10: note = Description of sequence: Splice site sequence
aaggttaaga

SEQ ID NO: 5324 - RNA, 10 nt, synthetic construct
  source 1..10: mol_type = other RNA
  misc_feature 1..10: note = Description of sequence: Splice site sequence
cgggtaaatg

SEQ ID NO: 5325 - RNA, 10 nt, synthetic construct
  source 1..10: mol_type = other RNA
  misc_feature 1..10: note = Description of sequence: Splice site sequence
gaggttcgca

SEQ ID NO: 5326 - RNA, 10 nt, synthetic construct
  source 1..10: mol_type = other RNA
  misc_feature 1..10: note = Description of sequence: Splice site sequence
gaggctctgg

SEQ ID NO: 5327 - RNA, 10 nt, synthetic construct
  source 1..10: mol_type = other RNA
  misc_feature 1..10: note = Description of sequence: Splice site sequence
atggtgggac

SEQ ID NO: 5328 - RNA, 10 nt, synthetic construct
  source 1..10: mol_type = other RNA
  misc_feature 1..10: note = Description of sequence: Splice site sequence
aacgtggtag

SEQ ID NO: 5329 - RNA, 10 nt, synthetic construct
  source 1..10: mol_type = other RNA
  misc_feature 1..10: note = Description of sequence: Splice site sequence
aaggtgatag

SEQ ID NO: 5330 - RNA, 10 nt, synthetic construct
  source 1..10: mol_type = other RNA
  misc_feature 1..10: note = Description of sequence: Splice site sequence
ggggtttgca

SEQ ID NO: 5331 - RNA, 10 nt, synthetic construct
  source 1..10: mol_type = other RNA
  misc_feature 1..10: note = Description of sequence: Splice site sequence
catgtaaggg

SEQ ID NO: 5332 - RNA, 10 nt, synthetic construct
  source 1..10: mol_type = other RNA
  misc_feature 1..10: note = Description of sequence: Splice site sequence
tcagttgagt

SEQ ID NO: 5333 - RNA, 10 nt, synthetic construct
  source 1..10: mol_type = other RNA
  misc_feature 1..10: note = Description of sequence: Splice site sequence
aaagtgcggc

SEQ ID NO: 5334 - RNA, 10 nt, synthetic construct
  source 1..10: mol_type = other RNA
  misc_feature 1..10: note = Description of sequence: Splice site sequence
agagtgagcc

SEQ ID NO: 5335 - RNA, 10 nt, synthetic construct
  source 1..10: mol_type = other RNA
  misc_feature 1..10: note = Description of sequence: Splice site sequence
atggcaagaa

SEQ ID NO: 5336 - RNA, 10 nt, synthetic construct
  source 1..10: mol_type = other RNA
  misc_feature 1..10: note = Description of sequence: Splice site sequence
acagtaaggt

SEQ ID NO: 5337 - RNA, 10 nt, synthetic construct
  source 1..10: mol_type = other RNA
  misc_feature 1..10: note = Description of sequence: Splice site sequence
aaggtctcta

SEQ ID NO: 5338 - RNA, 10 nt, synthetic construct
  source 1..10: mol_type = other RNA
  misc_feature 1..10: note = Description of sequence: Splice site sequence
gtggtaaaaa

SEQ ID NO: 5339 - RNA, 10 nt, synthetic construct
  source 1..10: mol_type = other RNA
  misc_feature 1..10: note = Description of sequence: Splice site sequence
aaagtaggtg

SEQ ID NO: 5340 - RNA, 10 nt, synthetic construct
  source 1..10: mol_type = other RNA
  misc_feature 1..10: note = Description of sequence: Splice site sequence
taggtgcact

SEQ ID NO: 5341 - RNA, 10 nt, synthetic construct
  source 1..10: mol_type = other RNA
  misc_feature 1..10: note = Description of sequence: Splice site sequence
gtcgtggtat

SEQ ID NO: 5342 - RNA, 10 nt, synthetic construct
  source 1..10: mol_type = other RNA
  misc_feature 1..10: note = Description of sequence: Splice site sequence
caggtatagg

SEQ ID NO: 5343 - RNA, 10 nt, synthetic construct
  source 1..10: mol_type = other RNA
  misc_feature 1..10: note = Description of sequence: Splice site sequence
tgagtgagag

SEQ ID NO: 5344 - RNA, 10 nt, synthetic construct
  source 1..10: mol_type = other RNA
  misc_feature 1..10: note = Description of sequence: Splice site sequence
actgtgagcc

SEQ ID NO: 5345 - RNA, 10 nt, synthetic construct
  source 1..10: mol_type = other RNA
  misc_feature 1..10: note = Description of sequence: Splice site sequence
atcgttagtt

SEQ ID NO: 5346 - RNA, 10 nt, synthetic construct
  source 1..10: mol_type = other RNA
  misc_feature 1..10: note = Description of sequence: Splice site sequence
tttgtaccaa

SEQ ID NO: 5347 - RNA, 10 nt, synthetic construct
  source 1..10: mol_type = other RNA
  misc_feature 1..10: note = Description of sequence: Splice site sequence
tgggtgagat

SEQ ID NO: 5348 - RNA, 10 nt, synthetic construct
  source 1..10: mol_type = other RNA
  misc_feature 1..10: note = Description of sequence: Splice site sequence
agagtgagaa

SEQ ID NO: 5349 - RNA, 10 nt, synthetic construct
  source 1..10: mol_type = other RNA
  misc_feature 1..10: note = Description of sequence: Splice site sequence
agagtagggg

SEQ ID NO: 5350 - RNA, 10 nt, synthetic construct
  source 1..10: mol_type = other RNA
  misc_feature 1..10: note = Description of sequence: Splice site sequence
agggcaagta

SEQ ID NO: 5351 - RNA, 10 nt, synthetic construct
  source 1..10: mol_type = other RNA
  misc_feature 1..10: note = Description of sequence: Splice site sequence
cgggtcagta

SEQ ID NO: 5352 - RNA, 10 nt, synthetic construct
  source 1..10: mol_type = other RNA
  misc_feature 1..10: note = Description of sequence: Splice site sequence
ttggtatgcc

SEQ ID NO: 5353 - RNA, 10 nt, synthetic construct
  source 1..10: mol_type = other RNA
  misc_feature 1..10: note = Description of sequence: Splice site sequence
cgggttagat

SEQ ID NO: 5354 - RNA, 10 nt, synthetic construct
  source 1..10: mol_type = other RNA
  misc_feature 1..10: note = Description of sequence: Splice site sequence
ggggtgaagt

SEQ ID NO: 5355 - RNA, 10 nt, synthetic construct
  source 1..10: mol_type = other RNA
  misc_feature 1..10: note = Description of sequence: Splice site sequence
cccgtgtgaa

SEQ ID NO: 5356 - RNA, 10 nt, synthetic construct
  source 1..10: mol_type = other RNA
  misc_feature 1..10: note = Description of sequence: Splice site sequence
gcagtttgga

SEQ ID NO: 5357 - RNA, 10 nt, synthetic construct
  source 1..10: mol_type = other RNA
  misc_feature 1..10: note = Description of sequence: Splice site sequence
tgcgtaagac

SEQ ID NO: 5358 - RNA, 10 nt, synthetic construct
  source 1..10: mol_type = other RNA
  misc_feature 1..10: note = Description of sequence: Splice site sequence
agagtctgta

SEQ ID NO: 5359 - RNA, 10 nt, synthetic construct
  source 1..10: mol_type = other RNA
  misc_feature 1..10: note = Description of sequence: Splice site sequence
cacgtgagca

SEQ ID NO: 5360 - RNA, 10 nt, synthetic construct
  source 1..10: mol_type = other RNA
  misc_feature 1..10: note = Description of sequence: Splice site sequence
agggtaaaag

SEQ ID NO: 5361 - RNA, 10 nt, synthetic construct
  source 1..10: mol_type = other RNA
  misc_feature 1..10: note = Description of sequence: Splice site sequence
caggctgggt

SEQ ID NO: 5362 - RNA, 10 nt, synthetic construct
  source 1..10: mol_type = other RNA
  misc_feature 1..10: note = Description of sequence: Splice site sequence
gaagtcttca

SEQ ID NO: 5363 - RNA, 10 nt, synthetic construct
  source 1..10: mol_type = other RNA
  misc_feature 1..10: note = Description of sequence: Splice site sequence
aaggcaaaaa

SEQ ID NO: 5364 - RNA, 10 nt, synthetic construct
  source 1..10: mol_type = other RNA
  misc_feature 1..10: note = Description of sequence: Splice site sequence
gtagtaaata

SEQ ID NO: 5365 - RNA, 10 nt, synthetic construct
  source 1..10: mol_type = other RNA
  misc_feature 1..10: note = Description of sequence: Splice site sequence
ctagtgagag

SEQ ID NO: 5366 - RNA, 10 nt, synthetic construct
  source 1..10: mol_type = other RNA
  misc_feature 1..10: note = Description of sequence: Splice site sequence
gaagtttctg

SEQ ID NO: 5367 - RNA, 10 nt, synthetic construct
  source 1..10: mol_type = other RNA
  misc_feature 1..10: note = Description of sequence: Splice site sequence
cctgtacgta

SEQ ID NO: 5368 - RNA, 10 nt, synthetic construct
  source 1..10: mol_type = other RNA
  misc_feature 1..10: note = Description of sequence: Splice site sequence
gaggtgcgcg

SEQ ID NO: 5369 - RNA, 10 nt, synthetic construct
  source 1..10: mol_type = other RNA
  misc_feature 1..10: note = Description of sequence: Splice site sequence
aaggtgtaaa

SEQ ID NO: 5370 - RNA, 10 nt, synthetic construct
  source 1..10: mol_type = other RNA
  misc_feature 1..10: note = Description of sequence: Splice site sequence
ccagtatgtt

SEQ ID NO: 5371 - RNA, 10 nt, synthetic construct
  source 1..10: mol_type = other RNA
  misc_feature 1..10: note = Description of sequence: Splice site sequence
ccggtcagct

SEQ ID NO: 5372 - RNA, 10 nt, synthetic construct
  source 1..10: mol_type = other RNA
  misc_feature 1..10: note = Description of sequence: Splice site sequence
atggttcctg

SEQ ID NO: 5373 - RNA, 10 nt, synthetic construct
  source 1..10: mol_type = other RNA
  misc_feature 1..10: note = Description of sequence: Splice site sequence
caagttaaat

SEQ ID NO: 5374 - RNA, 10 nt, synthetic construct
  source 1..10: mol_type = other RNA
  misc_feature 1..10: note = Description of sequence: Splice site sequence
agagtaggct

SEQ ID NO: 5375 - RNA, 10 nt, synthetic construct
  source 1..10: mol_type = other RNA
  misc_feature 1..10: note = Description of sequence: Splice site sequence
atggtgggca

SEQ ID NO: 5376 - RNA, 10 nt, synthetic construct
  source 1..10: mol_type = other RNA
  misc_feature 1..10: note = Description of sequence: Splice site sequence
ggagtaagac

SEQ ID NO: 5377 - RNA, 10 nt, synthetic construct
  source 1..10: mol_type = other RNA
  misc_feature 1..10: note = Description of sequence: Splice site sequence
agggtcacga

SEQ ID NO: 5378 - RNA, 10 nt, synthetic construct
  source 1..10: mol_type = other RNA
  misc_feature 1..10: note = Description of sequence: Splice site sequence
taggtgatat

SEQ ID NO: 5379 - RNA, 10 nt, synthetic construct
  source 1..10: mol_type = other RNA
  misc_feature 1..10: note = Description of sequence: Splice site sequence
gaagtaagtc

SEQ ID NO: 5380 - RNA, 10 nt, synthetic construct
  source 1..10: mol_type = other RNA
  misc_feature 1..10: note = Description of sequence: Splice site sequence
cgggtaagat

SEQ ID NO: 5381 - RNA, 10 nt, synthetic construct
  source 1..10: mol_type = other RNA
  misc_feature 1..10: note = Description of sequence: Splice site sequence
caagtagcta

SEQ ID NO: 5382 - RNA, 10 nt, synthetic construct
  source 1..10: mol_type = other RNA
  misc_feature 1..10: note = Description of sequence: Splice site sequence
tgagtaaaat

SEQ ID NO: 5383 - RNA, 10 nt, synthetic construct
  source 1..10: mol_type = other RNA
  misc_feature 1..10: note = Description of sequence: Splice site sequence
gtcgtacgtg

SEQ ID NO: 5384 - RNA, 10 nt, synthetic construct
  source 1..10: mol_type = other RNA
  misc_feature 1..10: note = Description of sequence: Splice site sequence
atggtacgta

SEQ ID NO: 5385 - RNA, 10 nt, synthetic construct
  source 1..10: mol_type = other RNA
  misc_feature 1..10: note = Description of sequence: Splice site sequence
caggtctcgg

SEQ ID NO: 5386 - RNA, 10 nt, synthetic construct
  source 1..10: mol_type = other RNA
  misc_feature 1..10: note = Description of sequence: Splice site sequence
gaggcatgtc

SEQ ID NO: 5387 - RNA, 10 nt, synthetic construct
  source 1..10: mol_type = other RNA
  misc_feature 1..10: note = Description of sequence: Splice site sequence
agagtgggat

SEQ ID NO: 5388 - RNA, 10 nt, synthetic construct
  source 1..10: mol_type = other RNA
  misc_feature 1..10: note = Description of sequence: Splice site sequence
gtggttagag

SEQ ID NO: 5389 - RNA, 10 nt, synthetic construct
  source 1..10: mol_type = other RNA
  misc_feature 1..10: note = Description of sequence: Splice site sequence
tgggtggtga

SEQ ID NO: 5390 - RNA, 10 nt, synthetic construct
  source 1..10: mol_type = other RNA
  misc_feature 1..10: note = Description of sequence: Splice site sequence
aaggttaaac

SEQ ID NO: 5391 - RNA, 10 nt, synthetic construct
  source 1..10: mol_type = other RNA
  misc_feature 1..10: note = Description of sequence: Splice site sequence
cttgttagct

SEQ ID NO: 5392 - RNA, 10 nt, synthetic construct
  source 1..10: mol_type = other RNA
  misc_feature 1..10: note = Description of sequence: Splice site sequence
aaagtaggaa

SEQ ID NO: 5393 - RNA, 10 nt, synthetic construct
  source 1..10: mol_type = other RNA
  misc_feature 1..10: note = Description of sequence: Splice site sequence
taggttgtat

SEQ ID NO: 5394 - RNA, 10 nt, synthetic construct
  source 1..10: mol_type = other RNA
  misc_feature 1..10: note = Description of sequence: Splice site sequence
agggtgcgcc

SEQ ID NO: 5395 - RNA, 10 nt, synthetic construct
  source 1..10: mol_type = other RNA
  misc_feature 1..10: note = Description of sequence: Splice site sequence
aaggtgggct

SEQ ID NO: 5396 - RNA, 10 nt, synthetic construct
  source 1..10: mol_type = other RNA
  misc_feature 1..10: note = Description of sequence: Splice site sequence
taagtatctg

SEQ ID NO: 5397 - RNA, 10 nt, synthetic construct
  source 1..10: mol_type = other RNA
  misc_feature 1..10: note = Description of sequence: Splice site sequence
aaggtaacgt

SEQ ID NO: 5398 - RNA, 10 nt, synthetic construct
  source 1..10: mol_type = other RNA
  misc_feature 1..10: note = Description of sequence: Splice site sequence
atggtggggc

SEQ ID NO: 5399 - RNA, 10 nt, synthetic construct
  source 1..10: mol_type = other RNA
  misc_feature 1..10: note = Description of sequence: Splice site sequence
caagtacacg

SEQ ID NO: 5400 - RNA, 10 nt, synthetic construct
  source 1..10: mol_type = other RNA
  misc_feature 1..10: note = Description of sequence: Splice site sequence
ggcgtaagtg

SEQ ID NO: 5401 - RNA, 10 nt, synthetic construct
  source 1..10: mol_type = other RNA
  misc_feature 1..10: note = Description of sequence: Splice site sequence
atagtaggac

SEQ ID NO: 5402 - RNA, 10 nt, synthetic construct
  source 1..10: mol_type = other RNA
  misc_feature 1..10: note = Description of sequence: Splice site sequence
agagtgaggt

SEQ ID NO: 5403 - RNA, 10 nt, synthetic construct
  source 1..10: mol_type = other RNA
  misc_feature 1..10: note = Description of sequence: Splice site sequence
tttgtaaaaa

SEQ ID NO: 5404 - RNA, 10 nt, synthetic construct
  source 1..10: mol_type = other RNA
  misc_feature 1..10: note = Description of sequence: Splice site sequence
gaagtttgta

SEQ ID NO: 5405 - RNA, 10 nt, synthetic construct
  source 1..10: mol_type = other RNA
  misc_feature 1..10: note = Description of sequence: Splice site sequence
ctagtaatct

SEQ ID NO: 5406 - RNA, 10 nt, synthetic construct
  source 1..10: mol_type = other RNA
  misc_feature 1..10: note = Description of sequence: Splice site sequence
aaggttttta

SEQ ID NO: 5407 - RNA, 10 nt, synthetic construct
  source 1..10: mol_type = other RNA
  misc_feature 1..10: note = Description of sequence: Splice site sequence
gaggtgcgtt

SEQ ID NO: 5408 - RNA, 10 nt, synthetic construct
  source 1..10: mol_type = other RNA
  misc_feature 1..10: note = Description of sequence: Splice site sequence
taggcgagta

SEQ ID NO: 5409 - RNA, 10 nt, synthetic construct
  source 1..10: mol_type = other RNA
  misc_feature 1..10: note = Description of sequence: Splice site sequence
accgtgagta

SEQ ID NO: 5410 - RNA, 10 nt, synthetic construct
  source 1..10: mol_type = other RNA
  misc_feature 1..10: note = Description of sequence: Splice site sequence
caggtcccga

SEQ ID NO: 5411 - RNA, 10 nt, synthetic construct
  source 1..10: mol_type = other RNA
  misc_feature 1..10: note = Description of sequence: Splice site sequence
atggtactgg

SEQ ID NO: 5412 - RNA, 10 nt, synthetic construct
  source 1..10: mol_type = other RNA
  misc_feature 1..10: note = Description of sequence: Splice site sequence
tgagttcagt

SEQ ID NO: 5413 - RNA, 10 nt, synthetic construct
  source 1..10: mol_type = other RNA
  misc_feature 1..10: note = Description of sequence: Splice site sequence
aatgtgtggt

SEQ ID NO: 5414 - RNA, 10 nt, synthetic construct
  source 1..10: mol_type = other RNA
  misc_feature 1..10: note = Description of sequence: Splice site sequence
tccgttggtt

SEQ ID NO: 5415 - RNA, 10 nt, synthetic construct
  source 1..10: mol_type = other RNA
  misc_feature 1..10: note = Description of sequence: Splice site sequence
caggtcagag

SEQ ID NO: 5416 - RNA, 10 nt, synthetic construct
  source 1..10: mol_type = other RNA
  misc_feature 1..10: note = Description of sequence: Splice site sequence
caggtcccta

SEQ ID NO: 5417 - RNA, 10 nt, synthetic construct
  source 1..10: mol_type = other RNA
  misc_feature 1..10: note = Description of sequence: Splice site sequence
taggtagact

SEQ ID NO: 5418 - RNA, 10 nt, synthetic construct
  source 1..10: mol_type = other RNA
  misc_feature 1..10: note = Description of sequence: Splice site sequence
caagttaagg

SEQ ID NO: 5419 - RNA, 10 nt, synthetic construct
  source 1..10: mol_type = other RNA
  misc_feature 1..10: note = Description of sequence: Splice site sequence
gaggtgtgcg

SEQ ID NO: 5420 - RNA, 10 nt, synthetic construct
  source 1..10: mol_type = other RNA
  misc_feature 1..10: note = Description of sequence: Splice site sequence
gaagctgccc

SEQ ID NO: 5421 - RNA, 10 nt, synthetic construct
  source 1..10: mol_type = other RNA
  misc_feature 1..10: note = Description of sequence: Splice site sequence
cgagtacgtg

SEQ ID NO: 5422 - RNA, 10 nt, synthetic construct
  source 1..10: mol_type = other RNA
  misc_feature 1..10: note = Description of sequence: Splice site sequence
cgggtaggta

SEQ ID NO: 5423 - RNA, 10 nt, synthetic construct
  source 1..10: mol_type = other RNA
  misc_feature 1..10: note = Description of sequence: Splice site sequence
ttggtattga

SEQ ID NO: 5424 - RNA, 10 nt, synthetic construct
  source 1..10: mol_type = other RNA
  misc_feature 1..10: note = Description of sequence: Splice site sequence
attgtatgat

SEQ ID NO: 5425 - RNA, 10 nt, synthetic construct
  source 1..10: mol_type = other RNA
  misc_feature 1..10: note = Description of sequence: Splice site sequence
ttggtatgaa

SEQ ID NO: 5426 - RNA, 10 nt, synthetic construct
  source 1..10: mol_type = other RNA
  misc_feature 1..10: note = Description of sequence: Splice site sequence
gaggtggtca

SEQ ID NO: 5427 - RNA, 10 nt, synthetic construct
  source 1..10: mol_type = other RNA
  misc_feature 1..10: note = Description of sequence: Splice site sequence
gctgtatgaa

SEQ ID NO: 5428 - RNA, 10 nt, synthetic construct
  source 1..10: mol_type = other RNA
  misc_feature 1..10: note = Description of sequence: Splice site sequence
caggtgttgc

SEQ ID NO: 5429 - RNA, 10 nt, synthetic construct
  source 1..10: mol_type = other RNA
  misc_feature 1..10: note = Description of sequence: Splice site sequence
caggtaaaac

SEQ ID NO: 5430 - RNA, 10 nt, synthetic construct
  source 1..10: mol_type = other RNA
  misc_feature 1..10: note = Description of sequence: Splice site sequence
atagtaaggt

SEQ ID NO: 5431 - RNA, 10 nt, synthetic construct
  source 1..10: mol_type = other RNA
  misc_feature 1..10: note = Description of sequence: Splice site sequence
ctggttagag

SEQ ID NO: 5432 - RNA, 10 nt, synthetic construct
  source 1..10: mol_type = other RNA
  misc_feature 1..10: note = Description of sequence: Splice site sequence
agcgtgtgag

SEQ ID NO: 5433 - RNA, 10 nt, synthetic construct
  source 1..10: mol_type = other RNA
  misc_feature 1..10: note = Description of sequence: Splice site sequence
aaggttatct

SEQ ID NO: 5434 - RNA, 10 nt, synthetic construct
  source 1..10: mol_type = other RNA
  misc_feature 1..10: note = Description of sequence: Splice site sequence
cacgtgagta

SEQ ID NO: 5435 - RNA, 10 nt, synthetic construct
  source 1..10: mol_type = other RNA
  misc_feature 1..10: note = Description of sequence: Splice site sequence
agggtcagta

SEQ ID NO: 5436 - RNA, 10 nt, synthetic construct
  source 1..10: mol_type = other RNA
  misc_feature 1..10: note = Description of sequence: Splice site sequence
gaggtataat

SEQ ID NO: 5437 - RNA, 10 nt, synthetic construct
  source 1..10: mol_type = other RNA
  misc_feature 1..10: note = Description of sequence: Splice site sequence
caggttattt

SEQ ID NO: 5438 - RNA, 10 nt, synthetic construct
  source 1..10: mol_type = other RNA
  misc_feature 1..10: note = Description of sequence: Splice site sequence
agggtggact

SEQ ID NO: 5439 - RNA, 10 nt, synthetic construct
  source 1..10: mol_type = other RNA
  misc_feature 1..10: note = Description of sequence: Splice site sequence
attgtaattc

SEQ ID NO: 5440 - RNA, 10 nt, synthetic construct
  source 1..10: mol_type = other RNA
  misc_feature 1..10: note = Description of sequence: Splice site sequence
tttgtgggtt

SEQ ID NO: 5441 - RNA, 10 nt, synthetic construct
  source 1..10: mol_type = other RNA
  misc_feature 1..10: note = Description of sequence: Splice site sequence
atggtacgtg

SEQ ID NO: 5442 - RNA, 10 nt, synthetic construct
  source 1..10: mol_type = other RNA
  misc_feature 1..10: note = Description of sequence: Splice site sequence
aaggtgttcc

SEQ ID NO: 5443 - RNA, 10 nt, synthetic construct
  source 1..10: mol_type = other RNA
  misc_feature 1..10: note = Description of sequence: Splice site sequence
caggtgacgc

SEQ ID NO: 5444 - RNA, 10 nt, synthetic construct
  source 1..10: mol_type = other RNA
  misc_feature 1..10: note = Description of sequence: Splice site sequence
gaggtactaa

SEQ ID NO: 5445 - RNA, 10 nt, synthetic construct
  source 1..10: mol_type = other RNA
  misc_feature 1..10: note = Description of sequence: Splice site sequence
acagttcagt

SEQ ID NO: 5446 - RNA, 10 nt, synthetic construct
  source 1..10: mol_type = other RNA
  misc_feature 1..10: note = Description of sequence: Splice site sequence
gaggtcacgg

SEQ ID NO: 5447 - RNA, 10 nt, synthetic construct
  source 1..10: mol_type = other RNA
  misc_feature 1..10: note = Description of sequence: Splice site sequence
caagtaaggc

SEQ ID NO: 5448 - RNA, 10 nt, synthetic construct
  source 1..10: mol_type = other RNA
  misc_feature 1..10: note = Description of sequence: Splice site sequence
aaggtttggg

SEQ ID NO: 5449 - RNA, 10 nt, synthetic construct
  source 1..10: mol_type = other RNA
  misc_feature 1..10: note = Description of sequence: Splice site sequence
aaagtgggct

SEQ ID NO: 5450 - RNA, 10 nt, synthetic construct
  source 1..10: mol_type = other RNA
  misc_feature 1..10: note = Description of sequence: Splice site sequence
gcggttcttg

SEQ ID NO: 5451 - RNA, 10 nt, synthetic construct
  source 1..10: mol_type = other RNA
  misc_feature 1..10: note = Description of sequence: Splice site sequence
gaggtggagc

SEQ ID NO: 5452 - RNA, 10 nt, synthetic construct
  source 1..10: mol_type = other RNA
  misc_feature 1..10: note = Description of sequence: Splice site sequence
tgagtcagtg

SEQ ID NO: 5453 - RNA, 10 nt, synthetic construct
  source 1..10: mol_type = other RNA
  misc_feature 1..10: note = Description of sequence: Splice site sequence
caggtcaagg

SEQ ID NO: 5454 - RNA, 10 nt, synthetic construct
  source 1..10: mol_type = other RNA
  misc_feature 1..10: note = Description of sequence: Splice site sequence
agtgtaagct

SEQ ID NO: 5455 - RNA, 10 nt, synthetic construct
  source 1..10: mol_type = other RNA
  misc_feature 1..10: note = Description of sequence: Splice site sequence
gaggcagaaa

SEQ ID NO: 5456 - RNA, 10 nt, synthetic construct
  source 1..10: mol_type = other RNA
  misc_feature 1..10: note = Description of sequence: Splice site sequence
aaggtcacac

SEQ ID NO: 5457 - RNA, 10 nt, synthetic construct
  source 1..10: mol_type = other RNA
  misc_feature 1..10: note = Description of sequence: Splice site sequence
gaagtaggtt

SEQ ID NO: 5458 - RNA, 10 nt, synthetic construct
  source 1..10: mol_type = other RNA
  misc_feature 1..10: note = Description of sequence: Splice site sequence
gtcgtaagtt

SEQ ID NO: 5459 - RNA, 10 nt, synthetic construct
  source 1..10: mol_type = other RNA
  misc_feature 1..10: note = Description of sequence: Splice site sequence
agagtatgca

SEQ ID NO: 5460 - RNA, 10 nt, synthetic construct
  source 1..10: mol_type = other RNA
  misc_feature 1..10: note = Description of sequence: Splice site sequence
cctgtgcaaa

SEQ ID NO: 5461 - RNA, 10 nt, synthetic construct
  source 1..10: mol_type = other RNA
  misc_feature 1..10: note = Description of sequence: Splice site sequence
acggtgaaaa

SEQ ID NO: 5462 - RNA, 10 nt, synthetic construct
  source 1..10: mol_type = other RNA
  misc_feature 1..10: note = Description of sequence: Splice site sequence
caggtacgaa

SEQ ID NO: 5463 - RNA, 10 nt, synthetic construct
  source 1..10: mol_type = other RNA
  misc_feature 1..10: note = Description of sequence: Splice site sequence
catgtgagga

SEQ ID NO: 5464 - RNA, 10 nt, synthetic construct
  source 1..10: mol_type = other RNA
  misc_feature 1..10: note = Description of sequence: Splice site sequence
agcgtgagta

SEQ ID NO: 5465 - RNA, 10 nt, synthetic construct
  source 1..10: mol_type = other RNA
  misc_feature 1..10: note = Description of sequence: Splice site sequence
ggtgtgtagg

SEQ ID NO: 5466 - RNA, 10 nt, synthetic construct
  source 1..10: mol_type = other RNA
  misc_feature 1..10: note = Description of sequence: Splice site sequence
aacgtgagct

SEQ ID NO: 5467 - RNA, 10 nt, synthetic construct
  source 1..10: mol_type = other RNA
  misc_feature 1..10: note = Description of sequence: Splice site sequence
gaggtgaact

SEQ ID NO: 5468 - RNA, 10 nt, synthetic construct
  source 1..10: mol_type = other RNA
  misc_feature 1..10: note = Description of sequence: Splice site sequence
agagttcagt

SEQ ID NO: 5469 - RNA, 10 nt, synthetic construct
  source 1..10: mol_type = other RNA
  misc_feature 1..10: note = Description of sequence: Splice site sequence
aacgtgtgta

SEQ ID NO: 5470 - RNA, 10 nt, synthetic construct
  source 1..10: mol_type = other RNA
  misc_feature 1..10: note = Description of sequence: Splice site sequence
caggttgtgg

SEQ ID NO: 5471 - RNA, 10 nt, synthetic construct
  source 1..10: mol_type = other RNA
  misc_feature 1..10: note = Description of sequence: Splice site sequence
aaggtactag

SEQ ID NO: 5472 - RNA, 10 nt, synthetic construct
  source 1..10: mol_type = other RNA
  misc_feature 1..10: note = Description of sequence: Splice site sequence
tcagtgaaaa

SEQ ID NO: 5473 - RNA, 10 nt, synthetic construct
  source 1..10: mol_type = other RNA
  misc_feature 1..10: note = Description of sequence: Splice site sequence
aatgtctggt

SEQ ID NO: 5474 - RNA, 10 nt, synthetic construct
  source 1..10: mol_type = other RNA
  misc_feature 1..10: note = Description of sequence: Splice site sequence
acggtaaaat

SEQ ID NO: 5475 - RNA, 10 nt, synthetic construct
  source 1..10: mol_type = other RNA
  misc_feature 1..10: note = Description of sequence: Splice site sequence
ctggtgtaag

SEQ ID NO: 5476 - RNA, 10 nt, synthetic construct
  source 1..10: mol_type = other RNA
  misc_feature 1..10: note = Description of sequence: Splice site sequence
gaggtgcgaa

SEQ ID NO: 5477 - RNA, 10 nt, synthetic construct
  source 1..10: mol_type = other RNA
  misc_feature 1..10: note = Description of sequence: Splice site sequence
agggtttctc

SEQ ID NO: 5478 - RNA, 10 nt, synthetic construct
  source 1..10: mol_type = other RNA
  misc_feature 1..10: note = Description of sequence: Splice site sequence
caggtagccc

SEQ ID NO: 5479 - RNA, 10 nt, synthetic construct
  source 1..10: mol_type = other RNA
  misc_feature 1..10: note = Description of sequence: Splice site sequence
attgtattgg

SEQ ID NO: 5480 - RNA, 10 nt, synthetic construct
  source 1..10: mol_type = other RNA
  misc_feature 1..10: note = Description of sequence: Splice site sequence
atggtactta

SEQ ID NO: 5481 - RNA, 10 nt, synthetic construct
  source 1..10: mol_type = other RNA
  misc_feature 1..10: note = Description of sequence: Splice site sequence
gaggcccgac

SEQ ID NO: 5482 - RNA, 10 nt, synthetic construct
  source 1..10: mol_type = other RNA
  misc_feature 1..10: note = Description of sequence: Splice site sequence
tcggtaagac

SEQ ID NO: 5483 - RNA, 10 nt, synthetic construct
  source 1..10: mol_type = other RNA
  misc_feature 1..10: note = Description of sequence: Splice site sequence
cgggctgtag

SEQ ID NO: 5484 - RNA, 10 nt, synthetic construct
  source 1..10: mol_type = other RNA
  misc_feature 1..10: note = Description of sequence: Splice site sequence
tatgtgtgtg

SEQ ID NO: 5485 - RNA, 10 nt, synthetic construct
  source 1..10: mol_type = other RNA
  misc_feature 1..10: note = Description of sequence: Splice site sequence
taggtagaaa

SEQ ID NO: 5486 - RNA, 10 nt, synthetic construct
  source 1..10: mol_type = other RNA
  misc_feature 1..10: note = Description of sequence: Splice site sequence
gtggtcatta

SEQ ID NO: 5487 - RNA, 10 nt, synthetic construct
  source 1..10: mol_type = other RNA
  misc_feature 1..10: note = Description of sequence: Splice site sequence
taggtgaaag

SEQ ID NO: 5488 - RNA, 10 nt, synthetic construct
  source 1..10: mol_type = other RNA
  misc_feature 1..10: note = Description of sequence: Splice site sequence
actgtaattc

SEQ ID NO: 5489 - RNA, 10 nt, synthetic construct
  source 1..10: mol_type = other RNA
  misc_feature 1..10: note = Description of sequence: Splice site sequence
gcagtacagg

SEQ ID NO: 5490 - RNA, 10 nt, synthetic construct
  source 1..10: mol_type = other RNA
  misc_feature 1..10: note = Description of sequence: Splice site sequence
tcggtgagtc

SEQ ID NO: 5491 - RNA, 10 nt, synthetic construct
  source 1..10: mol_type = other RNA
  misc_feature 1..10: note = Description of sequence: Splice site sequence
tatgtaggga

SEQ ID NO: 5492 - RNA, 10 nt, synthetic construct
  source 1..10: mol_type = other RNA
  misc_feature 1..10: note = Description of sequence: Splice site sequence
atggtatgtc

SEQ ID NO: 5493 - RNA, 10 nt, synthetic construct
  source 1..10: mol_type = other RNA
  misc_feature 1..10: note = Description of sequence: Splice site sequence
gtggtgtgtg

SEQ ID NO: 5494 - RNA, 10 nt, synthetic construct
  source 1..10: mol_type = other RNA
  misc_feature 1..10: note = Description of sequence: Splice site sequence
ctggtgacct

SEQ ID NO: 5495 - RNA, 10 nt, synthetic construct
  source 1..10: mol_type = other RNA
  misc_feature 1..10: note = Description of sequence: Splice site sequence
aatgtgaata

SEQ ID NO: 5496 - RNA, 10 nt, synthetic construct
  source 1..10: mol_type = other RNA
  misc_feature 1..10: note = Description of sequence: Splice site sequence
taggtctcac

SEQ ID NO: 5497 - RNA, 10 nt, synthetic construct
  source 1..10: mol_type = other RNA
  misc_feature 1..10: note = Description of sequence: Splice site sequence
gaggttattg

SEQ ID NO: 5498 - RNA, 10 nt, synthetic construct
  source 1..10: mol_type = other RNA
  misc_feature 1..10: note = Description of sequence: Splice site sequence
tgagtaggct

SEQ ID NO: 5499 - RNA, 10 nt, synthetic construct
  source 1..10: mol_type = other RNA
  misc_feature 1..10: note = Description of sequence: Splice site sequence
cgggcacgta

SEQ ID NO: 5500 - RNA, 10 nt, synthetic construct
  source 1..10: mol_type = other RNA
  misc_feature 1..10: note = Description of sequence: Splice site sequence
gcagtaaata

SEQ ID NO: 5501 - RNA, 10 nt, synthetic construct
  source 1..10: mol_type = other RNA
  misc_feature 1..10: note = Description of sequence: Splice site sequence
ccggtgagag

SEQ ID NO: 5502 - RNA, 10 nt, synthetic construct
  source 1..10: mol_type = other RNA
  misc_feature 1..10: note = Description of sequence: Splice site sequence
taagttggtc

SEQ ID NO: 5503 - RNA, 10 nt, synthetic construct
  source 1..10: mol_type = other RNA
  misc_feature 1..10: note = Description of sequence: Splice site sequence
ccggtgagcc

SEQ ID NO: 5504 - RNA, 10 nt, synthetic construct
  source 1..10: mol_type = other RNA
  misc_feature 1..10: note = Description of sequence: Splice site sequence
aaggttgtca

SEQ ID NO: 5505 - RNA, 10 nt, synthetic construct
  source 1..10: mol_type = other RNA
  misc_feature 1..10: note = Description of sequence: Splice site sequence
ctggtattat

SEQ ID NO: 5506 - RNA, 10 nt, synthetic construct
  source 1..10: mol_type = other RNA
  misc_feature 1..10: note = Description of sequence: Splice site sequence
ggggtatggg

SEQ ID NO: 5507 - RNA, 10 nt, synthetic construct
  source 1..10: mol_type = other RNA
  misc_feature 1..10: note = Description of sequence: Splice site sequence
aaagtcagta

SEQ ID NO: 5508 - RNA, 10 nt, synthetic construct
  source 1..10: mol_type = other RNA
  misc_feature 1..10: note = Description of sequence: Splice site sequence
tttgtatgta

SEQ ID NO: 5509 - RNA, 10 nt, synthetic construct
  source 1..10: mol_type = other RNA
  misc_feature 1..10: note = Description of sequence: Splice site sequence
taagtactgc

SEQ ID NO: 5510 - RNA, 10 nt, synthetic construct
  source 1..10: mol_type = other RNA
  misc_feature 1..10: note = Description of sequence: Splice site sequence
caggtaccaa

SEQ ID NO: 5511 - RNA, 10 nt, synthetic construct
  source 1..10: mol_type = other RNA
  misc_feature 1..10: note = Description of sequence: Splice site sequence
gaagttcaga

SEQ ID NO: 5512 - RNA, 10 nt, synthetic construct
  source 1..10: mol_type = other RNA
  misc_feature 1..10: note = Description of sequence: Splice site sequence
atggtgcggt

SEQ ID NO: 5513 - RNA, 10 nt, synthetic construct
  source 1..10: mol_type = other RNA
  misc_feature 1..10: note = Description of sequence: Splice site sequence
gtggtgaggt

SEQ ID NO: 5514 - RNA, 10 nt, synthetic construct
  source 1..10: mol_type = other RNA
  misc_feature 1..10: note = Description of sequence: Splice site sequence
tgagtaagcc

SEQ ID NO: 5515 - RNA, 10 nt, synthetic construct
  source 1..10: mol_type = other RNA
  misc_feature 1..10: note = Description of sequence: Splice site sequence
tatgtaaggg

SEQ ID NO: 5516 - RNA, 10 nt, synthetic construct
  source 1..10: mol_type = other RNA
  misc_feature 1..10: note = Description of sequence: Splice site sequence
gtggtggaaa

SEQ ID NO: 5517 - RNA, 10 nt, synthetic construct
  source 1..10: mol_type = other RNA
  misc_feature 1..10: note = Description of sequence: Splice site sequence
gaggtgattg

SEQ ID NO: 5518 - RNA, 10 nt, synthetic construct
  source 1..10: mol_type = other RNA
  misc_feature 1..10: note = Description of sequence: Splice site sequence
ggagtttgta

SEQ ID NO: 5519 - RNA, 10 nt, synthetic construct
  source 1..10: mol_type = other RNA
  misc_feature 1..10: note = Description of sequence: Splice site sequence
aaggtcacga

SEQ ID NO: 5520 - RNA, 10 nt, synthetic construct
  source 1..10: mol_type = other RNA
  misc_feature 1..10: note = Description of sequence: Splice site sequence
gtggtagagg

SEQ ID NO: 5521 - RNA, 10 nt, synthetic construct
  source 1..10: mol_type = other RNA
  misc_feature 1..10: note = Description of sequence: Splice site sequence
taagtatatc

SEQ ID NO: 5522 - RNA, 10 nt, synthetic construct
  source 1..10: mol_type = other RNA
  misc_feature 1..10: note = Description of sequence: Splice site sequence
aaggtgtcca

SEQ ID NO: 5523 - RNA, 10 nt, synthetic construct
  source 1..10: mol_type = other RNA
  misc_feature 1..10: note = Description of sequence: Splice site sequence
tatgtggtat

SEQ ID NO: 5524 - RNA, 10 nt, synthetic construct
  source 1..10: mol_type = other RNA
  misc_feature 1..10: note = Description of sequence: Splice site sequence
gaggtacaat

SEQ ID NO: 5525 - RNA, 10 nt, synthetic construct
  source 1..10: mol_type = other RNA
  misc_feature 1..10: note = Description of sequence: Splice site sequence
aaggtggggg

SEQ ID NO: 5526 - RNA, 10 nt, synthetic construct
  source 1..10: mol_type = other RNA
  misc_feature 1..10: note = Description of sequence: Splice site sequence
ggagtaggtg

SEQ ID NO: 5527 - RNA, 10 nt, synthetic construct
  source 1..10: mol_type = other RNA
  misc_feature 1..10: note = Description of sequence: Splice site sequence
taggtgactt

SEQ ID NO: 5528 - DNA, 22 bp, synthetic construct
  source 1..22: mol_type = other DNA
  misc_feature 1..22: note = Description of sequence: primer
tcctcctgagaaagagaaggac

SEQ ID NO: 5529 - DNA, 19 bp, synthetic construct
  source 1..19: mol_type = other DNA
  misc_feature 1..19: note = Description of sequence: primer
gcctggagatccagactca

SEQ ID NO: 5530 - DNA, 24 bp, synthetic construct
  source 1..24: mol_type = other DNA
  misc_feature 1..24: note = Description of sequence: probe
  modified_base 1: mod_base = OTHER; note = Modification: 5cy5 dye
  modified_base 24: mod_base = OTHER; note = Modification: Iowa Black
tggcaacccttgaggccctgtcct

SEQ ID NO: 5531 - DNA, 23 bp, synthetic construct
  source 1..23: mol_type = other DNA
  misc_feature 1..23: note = Description of sequence: primer
cctcattggtcacaaattgactg

SEQ ID NO: 5532 - DNA, 23 bp, synthetic construct
  source 1..23: mol_type = other DNA
  misc_feature 1..23: note = Description of sequence: primer
tggagagctttctaagattgacc

SEQ ID NO: 5533 - DNA, 27 bp, synthetic construct
  source 1..27: mol_type = other DNA
  misc_feature 1..27: note = Description of sequence: probe
  modified_base 1: mod_base = OTHER; note = Modification: 5cy5 dye
  modified_base 27: mod_base = OTHER; note = Modification: Iowa Black
aggaaaatactgtttttagaaccccag

SEQ ID NO: 5534 - DNA, 23 bp, synthetic construct
  source 1..23: mol_type = other DNA
  misc_feature 1..23: note = Description of sequence: primer
tcctgagaaagagaaggacattg

SEQ ID NO: 5535 - DNA, 21 bp, synthetic construct
  source 1..21: mol_type = other DNA
  misc_feature 1..21: note = Description of sequence: primer
ctgtgggctcctgtagaaatc

SEQ ID NO: 5536 - DNA, 25 bp, synthetic construct
  source 1..25: mol_type = other DNA
  misc_feature 1..25: note = Description of sequence: probe
  modified_base 1: mod_base = OTHER; note = Modification: 6-FAM dye
  modified_base 25: mod_base = OTHER; note = Iowa Black
  modified_base 10: mod_base = OTHER; note = Modification: ZEN Quencher
tggcaacccttgagaggcaagccct

SEQ ID NO: 5537 - DNA, 25 bp, synthetic construct
  source 1..25: mol_type = other DNA
  misc_feature 1..25: note = Description of sequence: primer
caacaccatttcatagagaccagac

SEQ ID NO: 5538 - DNA, 28 bp, synthetic construct
  source 1..28: mol_type = other DNA
  misc_feature 1..28: note = Description of sequence: primer
gttctaaaatcatcccttggcttctaat

SEQ ID NO: 5539 - DNA, 30 bp, synthetic construct
  source 1..30: mol_type = other DNA
  misc_feature 1..30: note = Description of sequence: probe
  modified_base 1: mod_base = OTHER; note = Modification: 6-FAM dye
  modified_base 30: mod_base = OTHER; note = Iowa Black
  modified_base 10: mod_base = OTHER; note = Modification: ZEN Quencher
aaatactgtataggacctcttctgacatcc

SEQ ID NO: 5540 - DNA, 20 bp, synthetic construct
  source 1..20: mol_type = other DNA
  misc_feature 1..20: note = Description of sequence: donor sequence
gcgccatggcccgaagaccc

SEQ ID NO: 5541 - DNA, 157 bp, synthetic construct
  source 1..157: mol_type = other DNA
  misc_feature 1..157: note = Description of sequence: donor sequence
cggtgcggtccccgcggctctcggcggagccccgcgcccgccgcgccatggtgagcggctggcggctgttcaagaagattagcggcagctccggaggatctagcggcgcccgaagaccccggcacaggtaacggggagccgggcgggcggccgaggg

SEQ ID NO: 5542 - DNA, 20 bp, synthetic construct
  source 1..20: mol_type = other DNA
  misc_feature 1..20: note = Description of sequence: donor sequence
cagcttttccagggtcgcca

SEQ ID NO: 5543 - DNA, 160 bp, synthetic construct
  source 1..160: mol_type = other DNA
  misc_feature 1..160: note = Description of sequence: donor sequence
cgagtcggcccgaggcctccggggactgccgtgccgggcgggagaccgccatggtgagcggctggcggctgttcaagaagattagcggcagctccggaggatctagcggcgcgaccctggaaaagctgatgaaggccttcgagtccctcaagtccttcca

1. A compound of Formula (I): [chemical structure]
or a pharmaceutically acceptable salt, solvate, hydrate, tautomer, or stereoisomer thereof, wherein:
A and B are each independently cycloalkyl, heterocyclyl, aryl, or heteroaryl, each of which is optionally substituted with one or more R¹;
L is absent, C₁-C₆-alkylene, C₁-C₆-heteroalkylene, C(O), or —C(O)N(R^{B})—, wherein each alkylene and heteroalkylene is optionally substituted with one or more R⁸;
W, X, Z¹, and Z² are each independently C(R³) or N, wherein at least one of W and X is N;
each R¹ is independently hydrogen, C₁-C₆-alkyl, C₂-C₆-alkenyl, C₂-C₆-alkynyl, C₁-C₆-heteroalkyl, C₁-C₆-haloalkyl, cycloalkyl, heterocyclyl, aryl, C₁-C₆ alkylene-aryl, C₂-C₆ alkenylene-aryl, C₁-C₆ heteroalkylene-aryl, heteroaryl, C₁-C₆ alkylene-heteroaryl, C₁-C₆ heteroalkylene-heteroaryl, halo, cyano, oxo, —OR^{A}, —NR^{B}R^{C}, —NR^{B}C(O)R^{D}, —NO₂, —C(O)NR^{B}R^{C}, —C(O)R^{D}, —C(O)OR^{D}, or —S(O)ₓR^{D}, wherein each alkyl, alkylene, alkenyl, alkynyl, heteroalkyl, haloalkyl, cycloalkyl, heterocyclyl, aryl, and heteroaryl is optionally substituted with one or more R⁴; or
two R¹ groups, together with the atoms to which they are attached, form a 3-7-membered cycloalkyl, heterocyclyl, aryl, or heteroaryl, wherein each cycloalkyl, heterocyclyl, aryl, and heteroaryl is optionally substituted with one or more R⁴;
R² is hydrogen, C₁-C₆-alkyl, C₂-C₆-alkenyl, C₂-C₆-alkynyl, C₁-C₆-heteroalkyl, C₁-C₆-haloalkyl, cycloalkyl, heterocyclyl, aryl, heteroaryl, halo, cyano, —C(O)R^{D}, or —OR^{A}; wherein each alkyl, alkenyl, alkynyl, heteroalkyl, haloalkyl, cycloalkyl, heterocyclyl, aryl, and heteroaryl is optionally substituted with one or more R⁵;
R³ is hydrogen, C₁-C₆-alkyl, C₂-C₆-alkenyl, C₂-C₆-alkynyl, C₁-C₆-heteroalkyl, C₁-C₆-haloalkyl, cycloalkyl, heterocyclyl, aryl, heteroaryl, halo, cyano, —C(O)R^{D}, or —OR^{A}; wherein each alkyl, alkenyl, alkynyl, heteroalkyl, haloalkyl, cycloalkyl, heterocyclyl, aryl, and heteroaryl is optionally substituted with one or more R⁵;
each R⁴ is independently C₁-C₆-alkyl, C₂-C₆-alkenyl, C₂-C₆-alkynyl, C₁-C₆-heteroalkyl, C₁-C₆-haloalkyl, cycloalkyl, heterocyclyl, aryl, heteroaryl, halo, cyano, oxo, —OR^{A}, —NR^{B}R^{C}, —NR^{B}C(O)R^{D}, —NO₂, —C(O)NR^{B}R^{C}, —C(O)R^{D}, —C(O)OR^{D}, or —S(O)ₓR^{D}, wherein each alkyl, alkenyl, alkynyl, heteroalkyl, haloalkyl, cycloalkyl, heterocyclyl, aryl, and heteroaryl is optionally substituted with one or more R⁶;
each R⁵ is C₁-C₆-alkyl, C₂-C₆-alkenyl, C₂-C₆-alkynyl, C₁-C₆-heteroalkyl, C₁-C₆-haloalkyl, cycloalkyl, heterocyclyl, aryl, heteroaryl, halo, cyano, oxo, —OR^{A}, —NR^{B}R^{C}, —NR^{B}C(O)R^{D}, —NO₂, —C(O)NR^{B}R^{C}, —C(O)R^{D}, —C(O)OR^{D}, or —S(O)ₓR^{D};
each R⁶ is independently C₁-C₆-alkyl, C₁-C₆-heteroalkyl, C₁-C₆-haloalkyl, cycloalkyl, heterocyclyl, aryl, heteroaryl, halo, cyano, oxo, or —OR^{A};
each R^{A} is independently hydrogen, C₁-C₆ alkyl, C₂-C₆ alkenyl, C₂-C₆ alkynyl, C₁-C₆ haloalkyl, C₁-C₆ heteroalkyl, cycloalkyl, heterocyclyl, aryl, heteroaryl, C₁-C₆ alkylene-aryl, C₁-C₆ alkylene-heteroaryl, —C(O)R^{D}, or —S(O)ₓR^{D};
each of R^{B} and R^{C} is independently hydrogen, C₁-C₆ alkyl, C₂-C₆ alkenyl, C₂-C₆ alkynyl, C₁-C₆ heteroalkyl, C₁-C₆ haloalkyl, cycloalkyl, heterocyclyl, aryl, heteroaryl, —C(O)R^{D}, or —S(O)ₓR^{D}; or
R^{B} and R^{C} together with the atom to which they are attached form a 3-7-membered heterocyclyl ring optionally substituted with one or more R⁷;
each R^{D} is independently hydrogen, C₁-C₆ alkyl, C₂-C₆ alkenyl, C₂-C₆ alkynyl, C₁-C₆ heteroalkyl, C₁-C₆ haloalkyl, cycloalkyl, heterocyclyl, aryl, heteroaryl, C₁-C₆ alkylene-aryl, or C₁-C₆ alkylene-heteroaryl;
each R⁷ and R⁸ is independently C₁-C₆-alkyl, halo, cyano, oxo, or —OR^{A1};
each R^{A1} is hydrogen or C₁-C₆-alkyl; and
x is 0, 1, or 2.

2. The compound of claim 1, wherein each of A and B is independently heteroaryl or heterocyclyl, each of which is optionally substituted with one or more R¹.

3. The compound of any one of the preceding claims, wherein one of A and B is independently a monocyclic heteroaryl or bicyclic heteroaryl, each of which is optionally substituted with one or more R¹.

4. The compound of any one of the preceding claims, wherein one of A and B is independently a bicyclic heteroaryl optionally substituted with one or more R¹.

5. The compound of any one of the preceding claims, wherein one of A and B is independently a nitrogen-containing heteroaryl optionally substituted with one or more R¹.

6. The compound of any one of the preceding claims, wherein one of A and B is a 5-10 membered heteroaryl optionally substituted with one or more R¹.

7. The compound of any one of the preceding claims, wherein one of A and B is independently selected from [chemical structure]
wherein R¹ is as described in claim 1.

8. The compound of any one of the preceding claims, wherein one of A and B is independently selected from [chemical structure]
wherein R¹ is as described in claim 1.

9. The compound of any one of the preceding claims, wherein one of A and B is independently selected from [chemical structure]
wherein each R¹ is independently C₁-C₆-alkyl, C₁-C₆-heteroalkyl, C₁-C₆-haloalkyl, halo, cyano, or —OR^{A}, and each alkyl, heteroalkyl, and haloalkyl is optionally substituted with one or more R⁴.

10. The compound of any one of the preceding claims, wherein one of A and B is independently [chemical structure]
wherein each R¹ is independently C₁-C₆-alkyl, C₁-C₆-heteroalkyl, C₁-C₆-haloalkyl, halo, cyano, or —OR^{A}, and each alkyl, heteroalkyl, and haloalkyl is optionally substituted with one or more R⁴.

11. The compound of any one of the preceding claims, wherein A is selected from [chemical structure]
wherein R¹ is as described in claim 1.

12. The compound of any one of the preceding claims, wherein B is selected from [chemical structure]
wherein R¹ is as described in claim 1.

13. The compound of any one of the preceding claims, wherein A is selected from [chemical structure]
wherein each R^{1a} is independently C₁-C₆-alkyl, C₁-C₆-heteroalkyl, C₁-C₆-haloalkyl, halo, cyano, or —OR^{A}, and each alkyl, heteroalkyl, and haloalkyl is optionally substituted with one or more R⁴.

14. The compound of any one of the preceding claims, wherein A is [chemical structure]
wherein R¹ is as described in claim 1.

15. The compound of any one of the preceding claims, wherein B is [chemical structure]
wherein R¹ is as described in claim 1.

16. The compound of any one of the preceding claims, wherein one of A and B is independently selected from

[chemical structure]

[chemical structure]

17. The compound of any one of the preceding claims, wherein one of A and B is independently selected from

[chemical structure]

18. The compound of any one of the preceding claims, wherein one of A and B is independently selected from

[chemical structure]

19. The compound of any one of the preceding claims, wherein A is selected from

[chemical structure]

20. The compound of any one of the preceding claims, wherein B is selected from

[chemical structure]

[chemical structure]

21. The compound of any one of the preceding claims, wherein A selected from

[chemical structure]

22. The compound of any one of the preceding claims, wherein B selected from

[chemical structure]

23. The compound of any one of the preceding claims, wherein one of A and B is independently a monocyclic heterocyclyl or bicyclic heterocyclyl, each of which is optionally substituted with one or more R¹.

24. The compound of any one of the preceding claims, wherein one of A and B is independently a nitrogen-containing heterocyclyl optionally substituted with one or more R¹.

25. The compound of any one of the preceding claims, wherein one of A and B is independently a 4-8 membered heterocyclyl optionally substituted with one or more R¹.

26. The compound of any one of the preceding claims, wherein one of A and B is independently selected from [chemical structure]
wherein R¹ is as described in claim 1.

27. The compound of any one of the preceding claims, wherein one of A and B is independently selected from [chemical structure]
wherein R¹ is as described in claim 1.

28. The compound of any one of the preceding claims, wherein one of A and B is [chemical structure]
wherein R¹ is as described in claim 1.

29. The compound of any one of the preceding claims, wherein A is [chemical structure]
and R¹ is as described in claim 1.

30. The compound of any one of the preceding claims, wherein B is selected from [chemical structure]
wherein R¹ is as described in claim 1.

31. The compound of any one of the preceding claims, wherein B is [chemical structure]
wherein R¹ is as described in claim 1.

32. The compound of any one of the preceding claims, wherein one of A and B is independently selected from

[chemical structure]

[chemical structure]

[chemical structure]

33. The compound of any one of the preceding claims, wherein one of A and B is independently selected from

[chemical structure]

34. The compound of any one of the preceding claims, wherein one of A and B is

[chemical structure]

35. The compound of any one of the preceding claims, wherein A is selected from

[chemical structure]

[chemical structure]

[chemical structure]

36. The compound of any one of the preceding claims, wherein B is selected from

[chemical structure]

[chemical structure]

[chemical structure]

37. The compound of any one of the preceding claims, wherein A is selected from

[chemical structure]

38. The compound of any one of the preceding claims, wherein B is selected from

[chemical structure]

39. The compound of any one of the preceding claims, wherein X is N.

40. The compound of any one of the preceding claims, wherein W is N.

41. The compound of any one of the preceding claims, wherein both of W and X is independently N.

42. The compound of any one of the preceding claims, wherein Z¹ is C(R³) (e.g., CH).

43. The compound of any one of the preceding claims, wherein Z¹ is N.

44. The compound of any one of the preceding claims, wherein X is N and W, Z¹, and Z² are each independently C(R³).

45. The compound of any one of the preceding claims, wherein X and Z¹ are each independently N, and W and Z² are each independently C(R³).

46. The compound of any one of the preceding claims, wherein X and W are each independently N and Z¹ is C(R³).

47. The compound of any one of the preceding claims, wherein each of W, X, and Z¹ are each independently N, and Z¹ is C(R³).

48. The compound of any one of the preceding claims, wherein R² is hydrogen.

49. The compound of any one of the preceding claims, wherein R² is C₁-C₆-alkyl, halo, or —OR^{A}.

50. The compound of any one of the preceding claims, wherein R² is —CH₃, —Cl, —F, —OCH₃, or

[chemical structure]

51. The compound of any one of the preceding claims, wherein L is absent or C₁-C₆-alkylene optionally substituted with one or more R⁸.

52. The compound of any one of the preceding claims, wherein L is absent.

53. The compound of any one of the preceding claims, wherein the compound of Formula (I) is Formula (I-a): [chemical structure]
or a pharmaceutically acceptable salt, solvate, hydrate, tautomer, or stereoisomer thereof, wherein A, B, W, X, Z¹, Z², R² and subvariables thereof are as defined in claim 1.

54. The compound of any one of the preceding claims, wherein the compound of Formula (I) is Formula (I-b): [chemical structure]
or a pharmaceutically acceptable salt, solvate, hydrate, tautomer, or stereoisomer thereof, wherein each of A, B, W, X, Z¹, R², R³, and subvariables thereof is as defined in claim 1.

55. The compound of any one of the preceding claims, wherein the compound of Formula (I) is Formula (I-c): [chemical structure]
or a pharmaceutically acceptable salt, solvate, hydrate, tautomer, or stereoisomer thereof, wherein each of A, B, W, Z¹, R², R³ and subvariables thereof is as defined in claim 1.

56. The compound of any one of the preceding claims, wherein the compound of Formula (I) is Formula (I-d): [chemical structure]
or a pharmaceutically acceptable salt, solvate, hydrate, tautomer, or stereoisomer thereof, wherein A, B, W, Z¹, R², R³ and subvariables thereof are as defined in claim 1.

57. The compound of any one of the preceding claims, wherein the compound of Formula (I) is a compound of Formula (I-e): [chemical structure]
or a pharmaceutically acceptable salt, solvate, hydrate, tautomer, or stereoisomer thereof, wherein each of A, B, W, R², R³ and subvariables thereof are defined as in claim 1.

58. The compound of any one of claims 1-53, wherein the compound of Formula (I) is a compound of Formula (I-f): [chemical structure]
or a pharmaceutically acceptable salt, solvate, hydrate, tautomer, or stereoisomer thereof, wherein each of A, B, W, R², m, and subvariables thereof are defined as in claim 1.

59. The compound of any one of claims 1-54, wherein the compound of Formula (I) is a compound of Formula (I-g): [chemical structure]
or a pharmaceutically acceptable salt, solvate, hydrate, tautomer, or stereoisomer thereof, wherein each of A, B, W, R², and subvariables thereof are defined as in claim 1.

60. The compound of any one of claims 1-51, wherein the compound of Formula (I) is a compound of Formula (I-h): [chemical structure]
or a pharmaceutically acceptable salt, solvate, hydrate, tautomer, or stereoisomer thereof, wherein each of A, B, W, R², and subvariables thereof are defined as in claim 1.

61. The compound of any one of claims 1-50, wherein the compound of Formula (I) is a compound of Formula (I-i): [chemical structure]
or a pharmaceutically acceptable salt, solvate, hydrate, tautomer, or stereoisomer thereof, wherein A, B, W, X, Z¹, Z², and R² are as defined in claim 1; each R^{8a} and R^{8b} is independently C₁-C₆-alkyl, halo, cyano, oxo, or —OR^{A1}; and y is 0, 1, 2, 3, or 4.

62. The compound of any one of claims 1-50, wherein the compound of Formula (I) is a compound of Formula (I-j): [chemical structure]
or a pharmaceutically acceptable salt, solvate, hydrate, tautomer, or stereoisomer thereof, wherein each R^{1a}, R^{1b}, R^{1c}, R^{8a} and R^{8b} is independently C₁-C₆-alkyl, halo, cyano, oxo, or —OR^{A1}; X¹ is C(R¹) or N; X² is C(R¹)₂ or N(R¹); y is 0, 1, 2, 3, or 4; and W, X, Z¹, Z², R¹ and R² are as defined in claim 1.

63. The compound of any one of claims 1-51, wherein the compound of Formula (I) is a compound of Formula (I-k): [chemical structure]
or a pharmaceutically acceptable salt, solvate, hydrate, tautomer, or stereoisomer thereof, wherein each of X¹ and X³ is independently C(R³) or N; X² is C or N; and wherein A, Z¹, R¹, R², and R³ are as defined in claim 1.

64. The compound of any one of claims 1-51, wherein the compound of Formula (I) is a compound of Formula (I-l): [chemical structure]
or a pharmaceutically acceptable salt, solvate, hydrate, tautomer, or stereoisomer thereof, wherein each of R^{1a}, R^{1b}, and R^{1c} is independently hydrogen, C₁-C₆-alkyl, halo, or —OR^{A}; and wherein A, R^{A}, Z¹, R¹, R², and R³ are as defined in claim 1.

65. The compound of any one of claims 1-51, wherein the compound of Formula (I) is a compound of Formula (I-m): [chemical structure]
or a pharmaceutically acceptable salt, solvate, hydrate, tautomer, or stereoisomer thereof, wherein each of X¹ and X³ is independently C(R¹) or N; X² is C or N; and wherein A, Z¹, R¹ and R² are as defined in claim 1.

66. The compound of any one of claims 1-51, wherein the compound of Formula (I) is a compound of Formula (I-n): [chemical structure]
or a pharmaceutically acceptable salt, solvate, hydrate, tautomer, or stereoisomer thereof, wherein each of R^{1a} and R^{1b} is independently hydrogen, C₁-C₆-alkyl, halo, or —OR^{A}; and wherein A, R^{A}, Z¹, R¹, R², and R³ are as defined in claim 1.

67. The compound of any one of claims 1-51, wherein the compound of Formula (I) is a compound of Formula (I-0): [chemical structure]
or a pharmaceutically acceptable salt, solvate, hydrate, tautomer, or stereoisomer thereof, wherein each of X¹ and X² is independently C(R¹) or N; and wherein A, Z¹, R¹ and R² are as defined in claim 1.

68. The compound of any one of claims 1-51, wherein the compound of Formula (I) is a compound of Formula (I-p): [chemical structure]
or a pharmaceutically acceptable salt, solvate, hydrate, tautomer, or stereoisomer thereof, wherein each of R^{1a}, R^{1b}, and R^{1c} is independently hydrogen, C₁-C₆-alkyl, halo, or —OR^{A}; and
wherein A, R^{A}, Z¹, R¹ and R² are as defined in claim 1.

69. The compound of any one of claims 1-51, wherein the compound of Formula (I) is a compound of Formula (I-q): [chemical structure]
or a pharmaceutically acceptable salt, solvate, hydrate, tautomer, or stereoisomer thereof, wherein X¹ is C(R¹); X² is C(R¹)₂ or N(R¹); and wherein B, Z¹, R¹, R² and R³ are as defined in claim 1.

70. The compound of any one of claims 1-51, wherein the compound of Formula (I) is a compound of Formula (I-r): [chemical structure]
or a pharmaceutically acceptable salt, solvate, hydrate, tautomer, or stereoisomer thereof, wherein each of R^{1c}, R^{1d} and R^{1e} is independently hydrogen, alkyl, halo, or heteroalkyl; or R^{1d} and R^{1c} together with the atoms to which they are attached, form a three or four membered cycloalkyl group; and wherein each of B, Z¹, Z², R², and R³ are as defined as in claim 1.

71. The compound of any one of claims 1-51, wherein the compound of Formula (I) is a compound of Formula (I-s): [chemical structure]
or a pharmaceutically acceptable salt, solvate, hydrate, tautomer, or stereoisomer thereof, wherein X¹ is C(R¹); X² is C(R¹)₂ or N(R¹); each of R^{1a}, R^{1b}, and R^{1c} is independently hydrogen, C₁-C₆-alkyl, halo, or —OR^{A} and wherein R^{A}, Z¹, R¹, R², and R³ are as defined in claim 1.

72. The compound of any one of claims 1-51, wherein the compound of Formula (I) is a compound of Formula (I-t): [chemical structure]
or a pharmaceutically acceptable salt, solvate, hydrate, tautomer, or stereoisomer thereof, wherein X¹ is C(R¹); X² is C(R¹)₂ or N(R¹); each of R^{1a}, R^{1b}, and R^{1c} is independently hydrogen, C₁-C₆-alkyl, halo, or —OR^{A} and wherein R^{A}, Z¹, R¹, and R² are as defined in claim 1.

73. The compound of any one of claims 1-51, wherein the compound of Formula (I) is a compound of Formula (I-u): [chemical structure]
or a pharmaceutically acceptable salt, solvate, hydrate, tautomer, or stereoisomer thereof, wherein X¹ is C(R¹); X² is C(R¹)₂ or N(R¹); each of R^{1a} and R^{1b} is independently hydrogen, C₁-C₆-alkyl, halo, or —OR^{A} and wherein R^{A}, Z¹, R¹, and R² are as defined in claim 1.

74. The compound of any one of claims 1-51, wherein the compound of Formula (I) is a compound of Formula (I-v): [chemical structure]
or a pharmaceutically acceptable salt, solvate, hydrate, tautomer, or stereoisomer thereof, wherein each of R^{1a}, R^{1b}, R^{1c}, R^{1d}, R^{1e}, and R^{1f} is independently hydrogen, C₁-C₆-alkyl, halo, or R^{A}; and wherein R^{A}, Z¹, R¹, and R² are as defined in claim 1.

75. The compound of the preceding claims, wherein:
A and B are each independently selected from heteroaryl (e.g., bicyclic heteroaryl) optionally substituted with R¹ and heterocyclyl (e.g., monocyclic heterocyclyl) optionally substituted with one or more R¹; and
m is 0 or 1; and
R² is C₁-C₆-alkyl, halo, or —OR^{A}.

76. The compound of any one of the preceding claims, wherein when Z¹ is N, B is bicyclic heteroaryl optionally substituted with one or more R¹, wherein at least one R¹ comprises an oxygen atom.

77. The compound of any one of the preceding claims, wherein the compound is selected from a compound listed in Table 1, or a pharmaceutically acceptable salt, solvate, hydrate, tautomer, or stereoisomer thereof.

78. A pharmaceutical composition comprising a compound of any one of the preceding claims and a pharmaceutically acceptable excipient.

79. The compound of any one of claims 1-77, or the pharmaceutical composition of claim 78, wherein the compound alters a target nucleic acid (e.g., an RNA, e.g., a pre-mRNA).

80. The compound of any one of claims 1-77, or the pharmaceutical composition of claim 78, wherein the compound binds to a target nucleic acid (e.g., an RNA, e.g., a pre-mRNA).

81. The compound of any one of claims 1-77, or the pharmaceutical composition of claim 78, wherein the compound stabilizes a target nucleic acid (e.g., an RNA, e.g., a pre-mRNA).

82. The compound of any one of claims 1-77, or the pharmaceutical composition of claim 78, wherein the compound increases splicing at splice site on a target nucleic acid (e.g., an RNA, e.g., a pre-mRNA), by about 0.5%, 1%, 2%, 3%, 4%, 5%, 6%, 7%, 8%, 9%10%, 15%, 20%, 25%, 30%, 35%, 40%, 45%, 50%, 55%, 60%, 65%, 70%, 75%, 80%, 85%, 90%, 95%, or more, e.g., as determined by qPCR.

83. The compound of any one of claims 1-77, or the pharmaceutical composition of claim 78, wherein the compound decreases splicing at splice site on a target nucleic acid (e.g., an RNA, e.g., a pre-mRNA), by about 0.5%, 1%, 2%, 3%, 4%, 5%, 6%, 7%, 8%, 9%, 10%, 15%, 20%, 25%, 30%, 35%, 40%, 45%, 50%, 55%, 60%, 65%, 70%, 75%, 80%, 85%, 90%, 95%, or more, e.g., as determined by qPCR %.

84. A method of forming a complex comprising a component of a spliceosome (e.g., a major spliceosome component or a minor spliceosome component), a nucleic acid (e.g., a DNA, RNA, e.g., a pre-mRNA), and a compound of Formula (I) or a composition thereof according to any one of claims 1-77 and the pharmaceutical composition of claim 78:
comprising contacting the nucleic acid (e.g., a DNA, RNA, e.g., a pre-mRNA) with a compound of Formula (I).

85. The method of claim 84, wherein the component of a spliceosome is recruited to the nucleic acid in the presence of the compound of Formula (I).

86. A method of altering the conformation of a nucleic acid (e.g., a DNA, RNA, e.g., a pre-mRNA) comprising contacting the nucleic acid with a compound of Formula (I) according to any one of claims 1-77, or the pharmaceutical composition of claim 78.

87. The method of claim 86, wherein the altering comprises forming a bulge in the nucleic acid.

88. The method of claim 86, wherein the altering comprises stabilizing a bulge in the nucleic acid.

89. The method of claim 86, wherein the altering comprises reducing a bulge in the nucleic acid.

90. The method of any one of any one of claims 86-89, wherein the nucleic acid comprises a splice site.

91. A method for treating a disease or disorder in a subject comprising administering to the subject a compound of Formula (I) according to any one of claims 1-77 or the pharmaceutical composition of claim 78.

92. The method of claim 91, wherein the disease or disorder comprises a proliferative disease (e.g., cancer, a benign neoplasm, or angiogenesis).

93. The method of any one of claims 91-92, wherein the proliferative disease is cancer.

94. The method of claim 91, wherein the disease or disorder comprises a neurological disease or disorder, autoimmune disease or disorder, immunodeficiency disease or disorder, lysosomal storage disease or disorder, cardiovascular disease or disorder, metabolic disease or disorder, respiratory disease or disorder, renal disease or disorder, or infectious disease.

95. The method of claim 94, wherein the disease or disorder comprises neurological disease or disorder.

96. The method of claim 95, wherein the disease or disorder comprises Huntington's disease.
